(19) United States
(12) Patent Application Publication
(10) Pub. No.: US 2007/0248628 A1
(43) Pub. Date: Oct. 25, 2007

(54) Immunogens in cancer stem cells

(76) Inventors: Lorraine Holowach Keller, Pipersville, PA (US); Ramila Philip, Ivyland, PA (US)

Correspondence Address: Lorraine H. Keller;Immunotope Inc., The Pennsylvania Biotechnology Center, 3805 Old Easton Road, Doylestown, PA, 18902, US

(21) Appl. No.: 11/633,858

(22) Filed: Dec. 5, 2006

Related U.S. Application Data
(62) Division of application No. 60/742,586, filed on Dec. 6, 2005.

(51) Int. Cl. A61K 39/00; A61P 35/00; C07H 21/02; C07K 2/00; C12Q 1/00

(52) U.S. Cl. 424/277.1; 435/4; 530/300; 536/23.1

(57) ABSTRACT

The present invention relates to compositions and methods for the prevention, treatment, and diagnosis of cancer, especially cancer stem cells. The invention discloses peptides, polypeptides, and polynucleotides that can be used to stimulate a CTL response against cancer cells, especially cancer stem cells.

### CROSS-REFERENCE TO RELATED APPLICATIONS

[0001] This application claims priority of U.S. Provisional Application No. 60/742,586 filed Dec. 6, 2005.

### FIELD OF THE INVENTION

[0002] The present invention relates generally to the field of immunogens whose structures incorporate polypeptides comprising epitopic peptides derived from proteins expressed by cancer cells, preferably cancer stem cells, and to uses of said immunogens for the treatment, prevention and diagnosis of cancer, most preferably ovarian and breast cancer.

[0003] There is no cure for cancer. Standard treatments include surgery, chemotherapy and radiation therapy, which are only temporarily effective in slowing the progression of advanced stage disease. Seventy to ninety percent of cancer patients die from recurrence of disease because standard treatments fail to eradicate residual tumor cells. These cells eventually metastasize, killing the patient. The only way to cure cancer is to eliminate all residual tumor cells throughout the body to prevent recurrence. Ideally, treatment would selectively kill tumor cells and would not adversely affect normal, healthy cells. One means to selectively kill tumor cells is by active immunotherapy, which activates the patient's own immune system to recognize and kill tumor cells.

[0004] It has long been recognized that only a very small percentage of cells in many types of tumors are capable of immortal growth (Southam C and Brunschwig, A. Cancer 14:971-78 (1960); Reya T., et al. Nature 414:105-111 (2001)). There is growing evidence that cancer stem cells are present in a number of cancers, including leukemia (Dick J. E. Cancer Cells 3:39-48 (1991)), glioma (Singh S. et al. Nature 432:396-401(2004)), colon (Reya T., and H. Clevers Nature 434:843-850 (2005)), ovarian (Bapat S., et al. Cancer Res. 65:3025-3029 (2005)), breast (Al-Hajj M., et al. Proc. Nat. Acad. Sci. 100:3983-3988 (2003)) lung (Kim, C., et al., Cell 121:823-836 (2005)), prostate (Schalken J. and van Leenders G. Curr. Opinion Genetics and Development 14:48-54 (2004)), retinoblastoma (Dyer, M. and R. Brenner Nature Rev. Cancer 5:91-101 (2005)) and hepatocellular carcinoma (Hsia et al. Hepatology 16:1327-33 (1992)). The cancer stem cell hypothesis (Reya T. et al. Nature 414:105-111 (2002)) teaches that certain tumors originate from and persist due to mutations in stem cells that undergo neoplastic transformation, resulting in unregulated, immortal proliferation>Transformed, immortal stem cells are referred to as cancer stem cells (CSC). CSC typically constitute only a small subset of the total tumor cell population, for example composing only approximately 1/1000 to 1/5000 cells in lung tumors and 1/1,000,000 in leukemia cells (Marx J. Science 301:1308-1310 (2003)). In breast tumors, distinct classes of cells have been isolated, including CSC clonal lines that continuously proliferate, and cell populations that terminally differentiate after only a few divisions (Al-Hajj et al. Proc. Nat Acad. Sci. 100:3983-3988 (2003)). Cancer stem cells have been isolated from established tumor cell lines ( Gudjonsson, T., R. Villadsen, H. L. Nielsen, L. Ronnov-Jessen, M. J. Bissell, and O. W. Petersen. Genes Dev 16:693 (2002); Kondo, T., T. Setoguchi, and T. Taga. Proc Natl Acad Sci USA 101:781 (2004); Ponti, D., A. Costa, N. Zaffaroni, G. Pratesi, G. Petrangolini, D. Coradini, S. Pilotti, M. A. Pierotti, and M. G. Daidone. Cancer Res 65:5506 (2005)) and retain the same phenotype as the tumors from which they were originally isolated.

[0005] Evidence from several tumor types suggests that pathways prominent in normal stem cell function, notably Wnt, Notch, and Ssh, become ‘dysregulated’ in CSC. Therefore understanding the neoplastic changes that occur in these pathways should lead to an understanding of how tumors form, how they are maintained, how they evade standard treatments, and how they can be eradicated. There is a need in the cancer field to develop therapeutic strategies to target and kill immortal cancer cells, preferably CSC, and to prevent their recurrence, in order to cure patients of the disease.

[0006] Characterizing the properties of tumors, and in particular immortal cancer stem cells, which are important therapeutic targets, has proven extremely difficult. Differential gene expression has been widely used to identify cancer-associated gene activity to identify cancer-associated gene products having potential therapeutic or diagnostic value. However, this approach has generated ‘unmanageably large amounts of data’ (Rhodes, D. et al, Proc. Nat. Acad. Sci. 101:9309-9314 (2004)). Typically, large gene expression profile databases are generated from normal and cancerous tissues to identify genes that are differentially expressed in cancer; that is, -up- or down-regulated in tumor cells compared to normal cells. In order to understand the fundamental underlying mechanisms of cancer, considerable effort has also been invested in identifying gene products common to multiple tumor types (Rhodes et al. ibid.). However, the vast amount of data that have been generated by microarray analysis has magnified the amount of information available without solving the critical problem of determining which essential features of neoplastic transformation and progression are characteristic of CSC, and which properties of CSC can be exploited to develop targeted and potent therapeutics to eradicate CSC and to prevent tumor recurrence and metastasis. Because tumors are highly heterogeneous, and cancer stem cells are only present in very small quantities, gene expression studies over-represent the cell populations that terminally differentiate and mask the characteristics of the very small proportion of CSC in the tumor that continually proliferate. This invention addresses the need for identifying candidates for therapeutics that can target CSC and destroy the small fraction of neoplastic cancer cells that are responsible for recurrence and metastasis.

[0007] Existing targeted drug treatment strategies, for example small molecules and antibodies, target gene products of differentiated pathways, which shrink tumors, but are not effective in killing CSC. This invention provides methods and compositions for targeting and destroying CSC to eradicate tumors and prevent recurrence and metastasis.

[0008] Immunotherapy can be used to efficiently target and kill tumor cells through the therapeutic application of tumor rejection antigens, which can be expressed as peptides, oligopeptides or polypeptides. Immunotherapy can be used post-surgery and chemotherapy to eliminate residual cancer cells throughout the body. Alternatively, immunotherapy can also be used at early stages of tumor development, Stage I/II, to induce tumor rejection and eliminate the tumor cells from the body while the tumor burden is low. To achieve a clinically effective outcome for the patient, it is essential to treat with antigens that will stimulate an immune response against immortal cells, including cancer stem cells.

[0009] The mammalian immune system has evolved a variety of mechanisms to protect the host from diseased cells. An important component of this response is mediated by cells referred to as cytotoxic T lymphocytes (CTLs), which are specialized immune cells that function primarily by recognizing and killing diseased cells, and also by secreting soluble molecules referred to as cytokines that can mediate a variety of effects on the immune system.

[0010] Evidence suggests that immunotherapy designed to stimulate a CTL response specifically against cancer cells will be effective in controlling and eliminating cancer cells (Clark, C and Vonderheide R. Clin. Cancer Res. 11:5333-5336 (2005)). The largest number of reports of human tumor-reactive CTLs have concerned cancers (Rosenberg et al., Nature Medicine 10:909-915 (2004); Hwu P. and Friedman R., J. Immunotherapy 25:189-201 (2002); Boon, T. et al., Ann. Rev. Immunol., 12:337-365, (1994)). The ability of tumor-specific CTLs to mediate tumor regression, in both human (Rosenberg, S. A. et al., N. Engl. J. Med., 319:1676-1680, (1988)) and animal models (Celluzzi, C. M. et al., J. Exp. Med., 183:283-287, (1996); Mayordomo, J. I. et al., Nat. Med., 1:1297-1302, (1995); Zitvogel, L. et al., J. Exp. Med., 183:87-97, (1996)), suggests that methods directed to increasing CTL activity would likely have a beneficial effect with respect to recognition and elimination of tumor cells.

[0011] In order for CTLs to kill diseased cells or to secrete cytokines in response to a tumor cell, the CTL must first recognize that cell as being cancerous. This process involves the interaction of the T cell receptor, located on the surface of the CTL, with what is generically referred to as a Major Histocompatibility Complex (MHC)-peptide complex that is located on the surface of the tumor cell. MHC-encoded molecules have been subdivided into two types, and are referred to as class I and class II MHC-encoded molecules. Background information on cellular immunity and its use in immunotherapy is found in Janeway, C. et al. (Immunobiology: The Immune System in Health and Disease, Chapter 8. T Cell-Mediated Immunity. 5^{th} Edition. Chapter ISBN 0 8185-3642-x (2001)).

[0012] In the human immune system, MHC molecules are referred to as human leukocyte antigens (HLA). Within the MHC, located on chromosome six, are three different genetic loci that encode for class I MHC molecules. MHC molecules encoded at these loci are referred to as HLA-A, HLA-B, and HLA-C. The genes that can be encoded at each of these loci are extremely polymorphic, and thus, different individuals within the population express different class I MHC molecules on the surface of their cells. HLA-A1, HLA-A2, HLA-A3, HLA-B7, and HLA-B8 are examples of different class I MHC molecules that can be expressed from these loci. The present disclosure involves peptides that are associated with the HLA-A1, HLA-A2, or HLA-A11 molecules, HLA-A1 supertypes, HLA-A2 supertypes, and HLA-A11 supertypes and with the gene and protein that gives rise to these peptides. A supertype is a group of HLA molecules that present at least one shared epitope.

[0013] The peptides that associate with the MHC molecules can either be derived from proteins made within the cell, in which case they typically associate with class I MHC molecules (Rock, K. L. and Golde, U., Ann. Rev. Immunol., 17:739-779, (1999)) or they can be derived from proteins that are acquired from outside of the cell, in which case they typically associate with class II MHC molecules (Watts, C., Ann. Rev. Immunol., 15:821 850, (1997)). Peptides that evoke a cancer-specific CTL response most typically associate with class I MHC molecules; however certain cancer antigen-related peptides that elicit a CTL response may be associated with class II MHC molecules, for example, Her2/neu. The peptides that associate with a class I MHC molecule are typically nine amino acids in length, but can vary from a minimum length of eight amino acids to a maximum of fourteen amino acids in length. A class I MHC molecule with its bound peptide, or a class II MHC molecule with its bound peptide, is referred to as a MHC-peptide complex.

[0014] The process by which intact proteins or polypeptides are degraded into peptides and oligopeptides is referred to as antigen processing. Two major pathways of antigen processing occur within cells (Shastri N. et al. Ann. Rev. Immunol. 20:463-93 (2002); Rock, K. L. and Golde, U., Ann. Rev. Immunol., 17:739-779, (1999); Watts, C., Ann. Rev. Immunol., 15:821-850, (1997)). One pathway, which is largely restricted to cells that are antigen presenting cells such as dendritic cells, macrophages, and B cells, degrades proteins that are typically phagocytosed or endocytosed into the cell. Peptides derived in this pathway typically bind to class II MHC molecules. A second pathway of antigen processing is present in essentially all cells of the body. This second pathway primarily degrades proteins that are made within the cells, and the peptides derived from this pathway primarily bind to class I MHC molecules. Antigen processing by this latter pathway involves polypeptide synthesis and proteolysis in the cytoplasm. The peptides produced are then transported into the endoplasmic reticulum of the cell, associate with newly synthesized class I MHC molecules, and the resulting MHC-peptide complexes are then transported to the cell surface. Peptides derived from membrane and secreted proteins have also been identified. In some cases these peptides correspond to the signal sequence of the proteins that are cleaved from the protein by the signal peptidase. In other cases, it is thought that some fraction of the membrane and secreted proteins are transported from the endoplasmic reticulum into the cytoplasm where processing subsequently occurs.

[0015] Once bound to the class I MHC molecule and displayed on the surface of a cell, the peptides are recognized by antigen-specific receptors on CTLs. Mere expression of the class I MHC molecule itself is insufficient to trigger the CTL to kill the target cell: the antigenic peptide must be bound to the class I MHC molecule. Several methods have been developed to identify MHC-associated peptides recognized by CTL, each method relying on the ability of a CTL to recognize and kill only those cells expressing the appropriate class I MHC molecule with the peptide bound to it (Rosenberg, S. A., Immunity, 10:281-287, (1999)). Such peptides can be derived from a non-self source, such as a pathogen (for example, following the infection of a cell by a bacterium or a virus) or from a self-derived protein within a cell, such as a cancerous cell. Examples of sources of self-derived proteins in cancerous cells have been reviewed (Shastri N. et al. Ann. Rev. Immunol. 20:463-93 (2002), Gilboa, E., Immunity, 11:263-270, (1999); Rosenberg, S. A., Immunity, 10:281-287, (1999)) and include: (i) mutated genes; (ii) aberrantly expressed genes such as an alternative open reading frame or through an intron-exon boundary; (iii) genes that are selectively expressed in only the tumor; and (iv) normal differentiation genes that are expressed in the tumor and the normal cellular counterpart. The same proteins are processed by individuals of all HLA types; however the proteins are cleaved at different sites to generate different MHC-associated peptide epitopes.

[0016] Four different methodologies have typically been used for identifying the peptides that are recognized by CTLs. These are: (i) the genetic method; (ii) motif analysis; (iii) SErological analysis of REcombinant cDNA expression libraries (SEREX); and (iv) direct extraction and identification of native, endogenously processed and presented MHC-associated peptide epitopes. The genetic method is an approach in which progressively smaller subsets of cDNA libraries from tumor cells are transfected into cells that express the appropriate MHC molecule but not the tumor-specific epitope. The molecular clones encoding T cell epitopes are identified by their ability to reconstitute tumor specific T cell recognition of transfected cells. The exact T cell epitope is then identified by a combination of molecular subcloning and the use of synthetic peptides based on the predicted amino acid sequence. Such methods, however, are susceptible to inadvertent identification of cross-reacting peptides, and are not capable of identifying important post-translational modifications.

[0017] Motif analysis involves scanning a protein for peptides containing known class I MHC binding motifs, followed by synthesis and assay of the predicted peptides for their ability to be recognized by tumor-specific CTL. This approach requires prior knowledge of the protein from which the peptides are derived. This approach is also greatly hampered by the fact that not all of the predicted peptide epitopes are presented on the surface of a cell (Yewdell, J. W. and Bennink, J. R., Ann. Rev. Immunol., 17:51-88, (1999)), thus additional experimentation is required to determine which of the predicted epitopes is useful.

[0018] The SEREX approach relies on using antibodies in the serum of cancer patients to screen cDNA expression libraries for a clone that expresses a protein recognized by the antibody. This methodology presumes that an antibody response will necessarily have developed in the presence of a T cell response, and thus, the identified clone is a candidate that may encode a protein that can be recognized by T cells.

[0019] Direct immunoprecipitation involves a combination of cellular immunology and mass spectrometry, and uses native autoantigens to capture autoantibodies in cancer patient serum. This approach involves the actual identification of CTL epitopes by sequencing the naturally occurring peptides associated with class I MHC molecules extracted directly from tumor cells. In this approach, cells are first lysed in a detergent solution, the peptides associated with the class I MHC molecules are purified, and the peptides fractionated by high performance liquid chromatography (HPLC). The peptides are then used to reconstitute recognition by tumor-specific CTLs on a non-tumor cell expressing the appropriate MHC molecules. Sequencing is readily performed by tandem mass spectrometry (Henderson, R. A. et al., Proc. Natl. Acad. Sci. U.S.A, 90:10275-10279, (1993); Hogan, K. T. et al., Cancer Res., 58:5144-5150, (1998); Hunt, D. F. et al., Science, 255:1261-1263, (1992); Slingluff, C. L. Jr et al., J. Immunol., 150:2955-2963, (1993)).

[0020] Immunization with cancer-derived, class I MHC-encoded molecule-associated peptides, or with a precursor polypeptide or protein that contains the peptide, or with a gene that encodes a polypeptide or protein containing the peptide, are forms of immunotherapy that can be employed in the treatment of cancer. These forms of immunotherapy require that immunogens be identified so that they can be formulated into an appropriate vaccine. Although a variety of cancer-derived antigens have been identified (Rosenberg, S. A., Immunity, 10:281-287, (1999)), not all of these are appropriate for broad-based immunotherapy as the expression of some peptides is limited to the tumor derived from a specific patient. Furthermore, the number of class I MHC molecules from which tumor-derived peptides have been discovered is largely restricted to HLA-A2. Thus, it would be useful to identify additional peptides that complex with class I MHC molecules other than HLA-A2. Such peptides would be particularly useful in the treatment of cancer patients who do not express the HLA-A2 molecule, HLA-A1 or HLA-A11 antigens, HLA-A1 supertypes, HLA-A2 supertypes and HLA-A11 supertypes, for example. It is also particularly useful to identify antigenic peptides that are derived from different original proteins, even if the derived peptides associate with the same class I MHC molecule. Because an active immune response can result in the outgrowth of tumor cells that have lost the expression of a particular precursor protein for a given antigenic peptide, it is advantageous to stimulate an immune response against peptides derived from more than one protein, as the chances of the tumor cell losing the expression of more than one protein is the multiple of the chances of losing each of the individual proteins.

[0021] It is critical that the immunization process result in effective recognition of cancer cells by CTL. The only means by which CTL can distinguish cancerous cells is through recognition of tumor-associated antigens, also called tumor rejection antigens, presented on the tumor cell surface as peptides associated with MHC molecules. In the body, tumor cells may exist and proliferate undetected by the immune system, a phenomenon known as tolerance. Effective immunotherapeutic vaccines ‘break tolerance’ and activate CTL by providing at least one, and preferably more than one tumor-associated antigens present on the tumor cell surface, most preferably on the cancer stem cell surface, to Antigen Presenting Cells (APC). Examples of APC include dendritic cells (DC) and macrophages. APC provide exposure of the CTL to the antigen and a costimulatory signal that activates naive T cells to become CTL that recognize and destroy tumor cells that display the tumor-associated antigen in association with MHC molecules on their surfaces. Because CTL have memory, they can recognize and kill tumor cells over long periods of time, thus preventing recurrence and metastasis. However, it is essential that immunotherapeutic vaccination activates CTL to the same tumor-associated antigens presented on the surfaces of the tumor cells, most preferably cancer stem cells, in the context of MHC molecules. An explanation of tolerance and mechanisms for breaking tolerance are found in Janeway et al.

[0022] Embryonic and somatic stem cells and stem cell progenitors are capable of expressing MHC Class I and Class II molecules (Drukker M. et al., Proc Nat. Acad. Sci. 99:9864-9869 (2002); Harris P. et al., Blood 87:5104-5112 (1996); Smit et al., Proc. Nat. Acad. Sci. 95:10152-10157 (1998); Al Nimer, F. Neuroreport 15:1871-5 (2004)). Smit et al. observed T cells specifically directed against CD34+ Chronic Myeloid Leukemia (CML) progenitors and a subsequent antileukemic effect. Odeberg et al. (J. Neuroimmunol. 161:1-11 (2005)) reported high MHC Class I and Class II expression but low immunogenicity in neural precursors expanded in vitro. In certain stem cells, expression of MHC antigens can be stimulated, for example with interferon-gamma, a cytokine that upregulates MHC expression (Hori J., et al. Stem Cells 21:405-416 (2003)).

[0023] MHC expression in stem cells has been studied in the context of regenerative medicine, transplantation, graft immunogenicity and cell-based therapy. These studies do not consider or suggest a role for MHC Class I or Class II antigen expression in the context of characterization of cancer stem cells, or the identification of potential targets for immunotherapy against cancer stem cells, or for immunotherapeutic treatment for the treatment or prevention of cancer recurrence or metastasis. The present invention describes methods and compositions for cancer immunotherapy specifically intended to identify immunogens, that is, peptides, oligopeptides and their parent or source proteins or polypeptides that stimulate CTL recognition for the selective destruction of cancer cells, most preferably destruction of cancer stem cells. The present invention also contemplates identifying immunogens on terminally differentiated cancer cells that arise from cancer stem cells, as such immunogens can be used to kill differentiated cells and to shrink the tumor.

[0024] Immunotherapy for the purposes of this invention includes immunotherapeutic vaccines and antibody therapeutics. The invention also contemplates the use of certain antigens as cancer diagnostics and drug targets.

[0025] Immunization with cancer-derived, class I MHC-encoded molecule-associated peptides, or with a precursor polypeptide or protein that contains the peptide, or with a gene that encodes a polypeptide or protein containing the peptide, are forms of immunotherapy that can be employed in the treatment of cancer. These forms of immunotherapy require that immunogens be identified so that they can be appropriately formulated for administration to a cancer patient.

[0026] It is also particularly useful to identify antigenic peptides that are derived from a variety of different parent proteins with different functions, most preferably proteins involved in tumor survival, tumor growth and tumor metastasis. Because an active immune response can result in the outgrowth of tumor cells that have lost the expression of a particular precursor protein for a given antigenic peptide, it is advantageous to stimulate an immune response against multiple different antigens from more than one parent protein, as the chances of the tumor cell losing the expression of more than one protein is the multiple of the chances of losing each of the individual proteins. Even if an antigenic peptide is identified only in association with a single type of HLA molecule, the information is valuable for immunotherapy and immunization because as long as the source protein is known to undergo antigen processing, that source protein or polypeptide or fragments of the protein can be administered to patients having multiple HLA types, wherein each patient's Antigen Presenting Cells will properly process the protein in association with the patient's own HLA type to elicit a CTL response.

### SUMMARY OF THE INVENTION

[0027] The present invention relates to a process for identifying immunogens that elicit an immune response against cancer cells, more specifically against cancer stem cells. These immunogens can be used to treat patients who already have the disease, or prophylactically to prevent disease.

[0028] The present invention relates to Immunogens comprising polypeptides with amino acid sequences comprising epitopic sequences selected from the sequences of SEQ ID NO: 1-125 and 126-242 and which immunogens facilitate a cytotoxic T lymphocyte (CTL)-mediated immune response against cancers, most preferably cancers consisting of cancer stem cells. The present invention also relates to nucleic acid molecules that encode for the polypeptides and/or the full length proteins from which the polypeptides are derived, of such immunogens, and which can also be used to facilitate an immune response against cancer and cancer stem cells.

[0029] The present invention also relates to isolated oligopeptides or peptides comprising at least one epitopic peptide comprising the amino acid sequence of SEQ ID NO: 1-125, said oligopeptide or peptide consisting of 8 to about 50 amino acid residues, wherein said oligopeptide or peptide binds to class I MHC molecules or can be processed to bind to class I MHC molecules.

[0030] The present invention also relates to an isolated polypeptide of SEQ ID NO: 126 to 242, wherein said polypeptide binds to class I MHC molecules or can be processed to bind to class I MHC molecules.

[0031] The present invention provides compositions comprising the immunogen described herein, and polynucleotides that direct the synthesis of such polypeptides, whereby the oligopeptides and polypeptides of such immunogens are capable of inducing a CTL response against cells expressing a protein comprising an epitopic sequence of at least one of SEQ ID NO: 1-125 and 126-242. The cells are usually cancer cells, preferably ovarian or breast carcinomas and most preferably ovarian or breast carcinoma cancer stem cells expressing such proteins.

[0032] The present invention further relates to polynucleotides comprising the gene coding for a polypeptide of the SEQ ID NO: 125-242 disclosed herein. This invention relates to methods for identifying cancer stem cell immunogens that elicit a CTL response comprising obtaining tumorigenic cancer stem cells, identifying MHC-associated peptides that are present on said tumorigenic cancer stem cells, formulating a pharmaceutical preparation of one or more of immunogens comprising proteins or polypeptides with sequences selected from the group SEQ ID NO: 1-242 that bind to class I MHC molecules or can be processed to bind to class I MHC molecules, and administering said pharmaceutical preparation to a cancer patient to elicit a tumor-rejection response.

[0033] The invention further relates to methods for identifying cancer stem cell antigens that elicit a CTL response comprising obtaining cancer stem cells, identifying MHC-associated peptides that are present in said tumorigenic cancer stem cells, identifying the source protein or expression product from which said peptides were derived selected from the group consisting of SEQ ID NO: 126-242, formulating a pharmaceutical preparation of one or more of said source proteins or expression products, and administering said pharmaceutical preparation to a cancer patient to elicit a tumor-rejection response.

[0034] The invention further relates to pharmaceutical preparations wherein said preparations comprise polynucleotides coding for proteins, peptides or polypeptides with sequences selected from the group SEQ ID NO: 1-242 that bind to class I MHC molecules or can be processed to bind to class I MHC molecules that are capable of activating a tumor rejection CTL response in vitro or in vivo in a cancer patient.

[0035] The invention further relates to compositions for the treatment of cancer comprising CTL-reactive antigens isolated from cancer stem cells consisting of at least one tumor-rejection antigen that bind to class I MHC molecules or can be processed to bind to class I MHC molecules that stimulates a CTL response against tumor cells.

[0036] The invention further relates to methods and compositions for diagnosis of cancer comprising immunogens selected from the group consisting of SEQ ID NO: 126 to 242.

[0037] The invention further relates to methods and compositions for developing antibody therapeutics for treatment of cancer characterized by the presence of cancer stem cells comprising identifying CTL-reactive antigens for at one MHC-associated tumor-rejection antigen that binds to class I MHC molecules or can be processed to bind to class I MHC molecules present in said cancer stem cell.

[0038] The present invention also provides methods that comprise contacting a lymphocyte, especially a CTL, with an immunogen of the invention under conditions that induce a CTL response against a tumor cell, and more specifically against a cancer cell and most specifically against a cancer stem cell. The methods may involve contacting the CTL with the immunogenic peptide in vivo, in which case the peptides, polypeptides, and polynucleotides of the invention are used as vaccines, and will be delivered as a pharmaceutical composition comprising a pharmaceutically acceptable carrier and the immunogen, typically along with an adjuvant or one or more cytokines.

[0039] Alternatively, the immunogens of the present invention can be used to induce a CTL response in vitro. The generated CTL can then be introduced into a patient with cancer, said cancer characterized by the presence of cancer stem cells, more specifically cancer, colorectal carcinoma, ovarian carcinoma, breast carcinoma, lung carcinoma, or prostate carcinoma. Alternatively, the ability to generate CTL in vitro could serve as a diagnostic for cancer generally, including ovarian carcinoma, breast carcinoma, colorectal carcinoma, lung carcinoma, or prostate carcinoma.

[0040] The present invention also relates to a process for identifying immunogens that can be used to develop antibody therapeutics for cancer, most preferably therapeutics directed to destroying cancer stem cells.

[0041] The present invention also relates to a process for identifying immunogens that can be used as diagnostics and prognostics for cancer, preferably for the detection and monitoring of cancer stem cells, including autoantibody-based diagnostics for detection of autoantigens that characterize the cancer cells as cancer stem cells.

### Definitions

[0042] As used herein and except as noted otherwise, all terms are defined as given below.

[0043] The term “peptide” is used herein to designate a series of amino acid residues, connected one to the other typically by peptide bonds between the alpha-amino and carbonyl groups of the adjacent amino acids. The peptides are typically 9 amino acids in length, but can be as short as 8 amino acids in length, and as long as 14 amino acids in length.

[0044] The term “oligopeptide” is used herein to designate a series of amino acid residues, connected one to the other typically by peptide bonds between the alpha-amino and carbonyl groups of the adjacent amino acids. The length of the oligopeptide is not critical to the invention as long as the correct epitope or epitopes are maintained therein. The oligopeptides are typically less than about 50 amino acid residues in length, and greater than about 14 amino acids in length.

[0045] The term “polypeptide” designates a series of amino acid residues, connected one to the other typically by peptide bonds between the alpha-amino and carbonyl groups of the adjacent amino acids. The length of the polypeptide is not critical to the invention as long as the correct epitopes are maintained. In contrast to the terms peptide or oligopeptide, the term polypeptide is meant to refer to protein molecules of longer than about 50 residues in length.

[0046] A peptide, oligopeptide, protein, or polynucleotide coding for such a molecule is “imnunogenic” (and thus an “immunogen” within the present invention) if it is capable of inducing an immune response. In the case of the present invention, immunogenicity is defined in one way as the ability to induce a CTL-mediated response. Thus, an “immunogen” would be a molecule that is capable of inducing an immune response, and in the case of the present invention, a molecule capable of inducing a CTL response. An immunogen is a molecule that binds to class I MHC molecules or can be processed to bind to class I MHC molecules.

[0047] A “T cell epitope” or “epitopic peptide” is a peptide or oligopeptide molecule that binds to a class I or II MHC molecule and that is subsequently recognized by a T cell. T cell epitopes that bind to class I MHC molecules are typically 8-14 amino acids in length, and most typically 9 amino acids in length. T cell epitopes that bind to class II MHC molecules are typically 12-20 amino acids in length. In the case of epitopes that bind to class II MHC molecules, the same T cell epitope may share a common core segment, but differ in the length of the carboxy- and amino-terminal flanking sequences due to the fact that ends of the epitope molecule are not buried in the structure of the class II MHC molecule peptide-binding cleft as they are in the class I MHC molecule peptide-binding cleft.

[0048] There are three different genetic loci that encode for class I MHC molecules: HLA-A, HLA-B, and HLA-C. HLA-A1, HLA-A2, and HLA-A11 are examples of different class I MHC molecules that can be expressed from these loci. The present invention also involves peptides that are associated with HLA-A1 supertypes, HLA-A2 supertypes, and HLA-A11 supertypes. A supertype is a group of HLA molecules that present at least one shared epitope. MHC molecule peptides that have been found to bind to one member of the MHC allele supertype family (A1 for example) are thought to be likely to bind to other members of the same supertype family (A32 for example; see Table 1, below.

TABLE 1
HLA Supertypes

| Supertype | Motif | Genotypes |
|---|---|---|
| A1 | x[TI(SVLM)] | A*0101, A*0102, A*2501, A*2601, |
| | xxxxxx[WFY] | A*2604, A*3201, A*3601, A*4301, |
| | | A*8001 |
| A2 | x[LIVMATQ] | A*0201, A*0202, A*0203, A*0204, |
| | xxxxxx[LIVMAT] | A*0205, A*0206, A*0207, A*6802, |
| | | A*6901 |
| A3 | x[AILMVST] | A*0301, A*1101, A*3101, A*3301, |
| | xxxxxx[RK] | A*6801 |
| A24 | x[YF(WIVLMT)] | A*2301, A*2402, A*2403, A*2404, |
| | xxxxxx[FI(YWLM)] | A*3001, A*3002, A*3003 |
| B7 | x[P]xxxxxx | B*0702, B*0703, B*0704, B*0705, |
| | [ALIMVFWY] | B*1508, B*3501, B*3502, B*3503, |
| | | B*51, B*5301, B*5401, B*5501, |
| | | B*5502, B*5601, B*5602, B*6701, |
| | | B*7801 |
| B27 | x[RKH]xxxxxx | B*1401, B*1402, B*1503, B*1509, |
| | [FLY(WMI)] | B*1510, B*1518, B*2701, B*2702, |
| | | B*2703, B*2704, B*2705, B*2706, |
| | | B*2707, B*2708, B*3801, B*3802, |
| | | B*3901, B*3902, B*3903, B*3904, |
| | | B*4801, B*4802, B*7301 |
| B44 | x[E(D)]xxxxxx | B*18, B*3701, B*4001, B*4006, |
| | [FWYLIMVA] | B*4101, B*4402, B*4403, B*4501, |
| | | B*4901, B*5001 |
| B58 | x[AST]xxxxxx | B*1516, B*1517, B*5701, B*5702, |
| | [FWY(LIV)] | B*58 |
| B62 | x[QL(IVMP)] | B*1301, B*1302, B*1501, B*1502, |
| | xxxxxx[FWY(MIV)] | B*1506, B*1512, B*1513, B*1514, |
| | | B*1519, B*1521, B*4601, B*52 |

[0049] As used herein, reference to a DNA sequence includes both single stranded and double stranded DNA. Thus, the specific sequence, unless the context indicates otherwise, refers to the single strand DNA of such sequence, the duplex of such sequence with its complement (double stranded DNA) and the complement of such sequence.

[0050] The term “coding region” refers to that portion of a gene which either naturally or normally codes for the expression product of that gene in its natural genomic environment, i.e., the region coding in vivo for the native expression product of the gene. The coding region can be from a normal, mutated or altered gene, or can even be from a DNA sequence, or gene, wholly synthesized in the laboratory using methods well known to those of skill in the art of DNA synthesis.

[0051] The term “nucleotide sequence” refers to a heteropolymer of deoxyribonucleotides. The nucleotide sequence encoding for a particular peptide, oligopeptide, or polypeptide may be naturally occurring or may be synthetically constructed. Generally, DNA segments encoding the peptides, polypeptides, and proteins of this invention are assembled from cDNA fragments and short oligonucleotide linkers, or from a series of oligonucleotides, to provide a synthetic gene which is capable of being expressed in a recombinant transcriptional unit comprising regulatory elements derived from a microbial or viral operon.

[0052] The term “source protein” means that polypeptide that is the natural translation product of its gene and any nucleic acid sequence coding equivalents resulting from genetic code degeneracy and thus coding for the same amino acid(s). A ‘parent peptide’ or ‘parent protein’ as used herein designates a series of amino acid residues that comprise or naturally occur within the source protein.

[0053] The term “expression product” means that polypeptide or source protein that is the natural translation product of the gene and any nucleic acid sequence coding equivalents resulting from genetic code degeneracy and thus coding for the same amino acid(s).

[0054] The term “fragment,” when referring to a coding sequence, means a portion of DNA comprising less than the complete coding region whose expression product retains essentially the same biological function or activity as the expression product of the complete coding region.

[0055] The term “DNA segment” refers to a DNA polymer, in the form of a separate fragment or as a component of a larger DNA construct, which has been derived from DNA isolated at least once in substantially pure form, i.e., free of contaminating endogenous materials and in a quantity or concentration enabling identification, manipulation, and recovery of the segment and its component nucleotide sequences by standard biochemical methods, for example, by using a cloning vector. Such segments are provided in the form of an open reading frame uninterrupted by internal nontranslated sequences, or introns, which are typically present in eukaryotic genes. Sequences of non-translated DNA may be present downstream from the open reading frame, where the same do not interfere with manipulation or expression of the coding regions.

[0056] The term “primer” means a short nucleic acid sequence that is paired with one strand of DNA and provides a free 3′OH end at which a DNA polymerase starts synthesis of a deoxyribonucleotide chain.

[0057] The term “promoter” means a region of DNA involved in binding of RNA polymerase to initiate transcription.

[0058] The term “open reading frame (ORF)” means a series of triplets coding for amino acids without any termination codons and is a sequence (potentially) translatable into protein.

[0059] The term “isolated” means that the material is removed from its original environment (e.g., the natural environment if it is naturally occurring). For example, a naturally-occurring polynucleotide or polypeptide present in a living animal is not isolated, but the same polynucleotide or polypeptide, separated from some or all of the coexisting materials in the natural system, is isolated. Such polynucleotides could be part of a vector and/or such polynucleotides or polypeptides could be part of a composition, and still be isolated in that such vector or composition is not part of its natural environment.

[0060] The polynucleotides, and recombinant or immunogenic polypeptides, disclosed in accordance with the present invention may also be in “purified” form. The term “purified” does not require absolute purity; rather, it is intended as a relative definition, and can include preparations that are highly purified or preparations that are only partially purified, as those terms are understood by those of skill in the relevant art. For example, individual clones isolated from a cDNA library have been conventionally purified to electrophoretic homogeneity. Purification of starting material or natural material to at least one order of magnitude, preferably two or three orders, and more preferably four or five orders of magnitude is expressly contemplated. Furthermore, the claimed polypeptide which has a purity of preferably 0.001%, or at least 0.01% or 0.1%; and even desirably 1% by weight or greater is expressly contemplated.

[0061] The nucleic acids and polypeptide expression products disclosed according to the present invention, as well as expression vectors containing such nucleic acids and/or such polypeptides, may be in “enriched form.” As used herein, the term “enriched” means that the concentration of the material is at least about 2, 5, 10, 100, or 1000 times its natural concentration (for example), advantageously 0.01%, by weight, preferably at least about 0.1% by weight. Enriched preparations of about 0.5%, 1%, 5%, 10%, and 20% by weight are also contemplated. The sequences, constructs, vectors, clones, and other materials comprising the present invention can advantageously be in enriched or isolated form.

[0062] The term “active fragment” means a fragment that generates an immune response (i.e., has immunogenic activity) when administered, alone or optionally with a suitable adjuvant, to an animal, such as a mammal, for example, a human, a rabbit or a mouse, such immune response taking the form of stimulating a CTL response within the recipient animal, such as a human. Alternatively, the “active fragment” may also be used to induce a CTL response in vitro.

[0063] As used herein, the terms “portion,” “segment,” and “fragment,” when used in relation to polypeptides, refer to a continuous sequence of residues, such as amino acid residues, which sequence forms a subset of a larger sequence. For example, if a polypeptide were subjected to treatment with any of the common endopeptidases, such as trypsin or chymotrypsin, the oligopeptides resulting from such treatment would represent portions, segments or fragments of the starting polypeptide. This means that any such fragment will necessarily contain as part of its amino acid sequence a segment, fragment or portion, that is substantially identical, if not exactly identical, to a sequence of SEQ ID NO: 1 to 125, which correspond to the naturally occurring, original or “parent” proteins of the SEQ ID NO: 126-242. When used in relation to polynucleotides, such terms refer to the products produced by treatment of said polynucleotides with any of the common endonucleases.

[0064] In accordance with the present invention, the term “percent identity” or “percent identical,” when referring to a sequence, means that a sequence is compared to a claimed or described sequence after alignment of the sequence to be compared (the “Compared Sequence”) with the described or claimed sequence (the “Reference Sequence”). The Percent Identity is then determined according to the following formula:
Percent Identity=100[1−(C/R)]
wherein C is the number of differences between the Reference Sequence and the Compared Sequence over the length of alignment between the Reference Sequence and the Compared Sequence wherein (i) each base or amino acid in the Reference Sequence that does not have a corresponding aligned base or amino acid in the Compared Sequence and (ii) each gap in the Reference Sequence and (iii) each aligned base or amino acid in the Reference Sequence that is different from an aligned base or amino acid in the Compared Sequence, constitutes a difference; and R is the number of bases or amino acids in the Reference Sequence over the length of the alignment with the Compared Sequence with any gap created in the Reference Sequence also being counted as a base or amino acid.

[0065] The term “autoantibody” is used herein to designate an antibody that reacts with the cells, tissues, or native proteins of the host in which it is produced.

[0066] The term “autoantigen” is used herein to designate an immunogen that stimulates the production of autoantibodies in the host in which it is produced.

[0067] If an alignment exists between the Compared Sequence and the Reference Sequence for which the percent identity as calculated above is about equal to or greater than a specified minimum Percent Identity then the Compared Sequence has the specified minimum percent identity to the Reference Sequence even though alignments may exist in which the herein above calculated Percent Identity is less than the specified Percent Identity.

### DETAILED DESCRIPTION OF THE INVENTION

[0068] The present invention relates generally to immunogens and immunogenic compositions, and methods of use therefore, for the prevention, treatment, and diagnosis of cancer, more specifically cancers harboring cancer stem cells, including ovarian, breast, colorectal, lung, prostate and liver carcinomas. Disclosed according to the invention are immunogens comprising proteins or polypeptides with sequences selected from the group SEQ ID NO: 1 to 242 whose amino acid sequences comprise one or more epitopic oligopeptides or peptides that bind to MHC molecules or can be processed to bind to MHC molecules. In addition, the invention further relates to DNA or RNA polynucleotides coding for peptides or oligopeptides selected from the group SEQ ID NO: 1-242, and that bind to MHC molecules or can be processed to bind to MHC molecules to stimulate a CTL response against cancer, and more specifically cancers containing cancer stem cells, especially ovarian and breast cancers.

[0069] In accordance with the present invention, there are disclosed specific oligopeptide sequences with amino acid sequences representing epitopic peptides and immunogenic oligopeptide sequences of at least about 8 amino acids in length, preferably about 9 amino acids in length, up to about 14 amino acids in length and may be present as part of a larger structure, such as an oligopeptide, polypeptide or source protein.

[0070] The polypeptides forming the immunogens of the present invention may consist of amino acid sequences comprising at least one and possibly two, three, four, or more sequences of about 8 to 11 residues in length. Said polypeptides can have any manner of amino acid substitutions and can be of any desired length so long as they have immunogenic activity in that they are able, under a set of conditions known to those in the art, to elicit in vitro or in vivo activation of Cytotoxic T lymphocytes (CTL), (i.e., a CTL response) against a presentation of a cancer specific protein, especially a cancer stem cell-associated protein, especially when such proteins are presented in association with MHC molecules, such as where said proteins are presented in vitro or in vivo by an antigen presenting cell (APC). The amino acid stretches may differ in amino acid sequence by at least one amino acid residue, for example a conservative amino acid residue or amino acids of the same general chemical character, such as where they are hydrophobic amino acids. The proteins and polypeptides forming the immunogens of the present invention can be naturally occurring or may be synthesized chemically.

[0071] The present invention is also directed to an isolated polypeptide, especially one having immunogenic activity, the sequence of which comprises within it one or more stretches comprising any two or more of the sequences of an MHC-associated peptide or oligopeptide and in any relative quantities and wherein said sequences may differ by one or more amino acids so long as the peptide stimulates a CTL response, in any given stretch of 8 to about 11 amino acid residues. In other embodiments, combinations and permutations of epitopic sequences may be part of an immunogen of the present invention or of such a polypeptide so long as any such polypeptide stimulates a CTL response.

[0072] Peptides, oligopeptides or polypeptides as disclosed herein may be prepared by methods well known to those skilled in the art. (Grant, G. A., Synthetic Peptides: A User's Guide, 1992, W. H. Freeman and Company, New York; Coligan, J. E. et al, Current Protocols in Protein Science, 1999, John Wiley & 5 Sons, Inc., New York).

[0073] Besides the peptide sequences identified as associated with MHC molecules, the proteins and polypeptides forming the immunogens of the present invention may also comprise one or more other immunogenic amino acid stretches known to be associated with cancer, and more specifically with carcinomas, including ovarian, carcinoma, colorectal carcinoma, breast carcinoma, lung carcinoma, hepatocellular or prostate carcinoma, and most specifically with cancer stem cells associated with carcinomas, including ovarian carcinoma, colorectal carcinoma, breast carcinoma, lung carcinoma, hepatocellular or prostate carcinoma. These immunogens may stimulate a CTL response in individuals of any HLA type.

[0074] The immunogens of the present invention can be in the form of a composition of one or more of the different immunogens and wherein each immunogen is present in any desired relative abundance. Such compositions can be homogeneous or heterogeneous with respect to the individual immunogenic peptide components present therein, having only one or more than one of such peptides.

[0075] The oligopeptides and polypeptides useful in practicing the present invention may be derived by fractionation of naturally occurring proteins by methods such as protease treatment, or they may be produced by recombinant or synthetic methodologies that are well known and clear to the skilled artisan (Ausubel, F. M. et al, Current Protocols in Molecular Biology, 1999, John Wiley & Sons, Inc., New York; Coligan, J. E. et al, Current Protocols in Protein Science, 1999, John Wiley & Sons, Inc., New York; Molecular Cloning: A Laboratory Manual, 1989, Cold Spring Harbor Laboratory Press, Cold Spring Harbor). The polypeptide may comprise a recombinant or synthetic polypeptide in which peptide or oligopeptide sequences may also be present in multiple copies.

[0076] Thus, oligopeptides and polypeptides of the present invention may have one, two, three, or more such immunogenic peptides within the amino acid sequence of said oligopeptides and polypeptides, and said immunogenic peptides, or epitopes, may be the same or may be different, or may have any number of such sequences wherein some of them are identical to each other in amino acid sequence while others within the same polypeptide sequence are different from each other and said epitopic sequences may occur in any order within said immunogenic polypeptide sequence. The location of such sequences within the sequence of a polypeptide forming an immunogen of the invention may affect relative immunogenic activity.

[0077] In addition, immunogens of the present invention may comprise more than one polypeptide comprising the amino acid sequences disclosed herein. Such polypeptides may be part of a single composition or may themselves be covalently or non-covalently linked to each other.

[0078] The immunogenic peptides disclosed herein may also be linked directly to, or through a spacer or linker to: an immunogenic carrier such as serum albumin, tetanus toxoid, keyhole limpet hemocyanin, dextran, or a recombinant virus particle; an immunogenic peptide known to stimulate a T helper cell type immune response; a cytokine such as interferon gamma or GMCSF; a targeting agent such as an antibody or receptor ligand; a stabilizing agent such as a lipid; or a conjugate of a plurality of epitopes to a branched lysine core structure, such as the so-called “multiple antigenic peptide” described in (Posnett, D. N. et al., J. Biol. Chem., 263:1719-1725, (1988)); a compound such as polyethylene glycol to increase the half life of the peptide; or additional amino acids such as a leader or secretory sequence, or a sequence employed for the purification of the mature sequence. Spacers and linkers are typically comprise relatively small, neutral molecules, such as amino acids and which are substantially uncharged under physiological conditions. Such spacers are typically selected from the group of nonpolar or neutral polar amino acids, such as glycine, alanine, serine and other similar amino acids. Such optional spacers or linkers need not comprise the same residues and thus may be either homo- or hetero-oligomers. When present, such linkers will commonly be of length at least one or two, commonly three, four, five, six, and possibly as much as or even up to 20 residues (in the case of amino acids). In addition, such linkers need not be composed of amino acids but any oligomeric structures will do as well so long as they provide the correct spacing so as to optimize the desired level of immunogenic activity of the immunogens of the present invention. The immunogen may therefore take any form that is capable of eliciting a CTL response. In addition, the immunogenic peptides of the present invention may be part of an immunogenic structure via attachments other than conventional peptide bonds. Thus, any manner of attaching the peptides of the invention to an immunogen of the invention, such as an immunogenic polypeptide as disclosed herein, could provide an immunogenic structure as claimed herein.

[0079] Thus, immunogens, such as polypeptides of the invention, are structures that contain the peptides disclosed according to the present invention but such immunogenic peptides may not necessarily be attached thereto by the conventional means of using ordinary peptide bonds. The immunogens of the present invention simply contain such peptides as part of their makeup, but how such peptides are to be combined to form the final immunogen or combination of immunogens is left to the talent and expertise of the user and is in no way restricted or limited by the disclosure contained herein.

[0080] The peptides that are naturally processed and bound to a class I MHC molecule, and which are recognized by a tumor-specific CTL, need not be the optimal peptides for stimulating a CTL response. See, for example, (Parkhurst, 25 M. R. et al., J. Immunol., 157:2539-2548, (1996); Rosenberg, S. A. et al., Nat. Med., 4:321-327, (1998)). Thus, there can be utility in modifying a peptide, such that it more readily induces a CTL response. Generally, peptides may be modified at two types of positions. The peptides may be modified at amino acid residues that are predicted to interact with the class I MHC molecule, in which case the goal is to create a peptide that has a higher affinity for the class I MHC molecule than does the parent peptide. The peptides can also be modified at amino acid residues that are predicted to interact with the T cell receptor on the CTL, in which case the goal is to create a peptide that has a higher affinity for the T cell receptor than does the parent peptide. Both of these types of modifications can result in a variant peptide that is related to a parent peptide, but which is better able to induce a CTL response than is the parent peptide. As used herein, the term “parent peptide” means a peptide or oligopeptide sequence identified as being associated with a MHC molecule.

[0081] The parent peptides disclosed herein can be modified by the substitution of one or more residues at different, possibly selective, sites within the peptide chain. Such substitutions may be of a conservative nature, for example, where one amino acid is replaced by an amino acid of similar structure and characteristics, such as where a hydrophobic amino acid is replaced by another hydrophobic amino acid. Even more conservative would be replacement of amino acids of the same or similar size and chemical nature, such as where leucine is replaced by isoleucine. In studies of sequence variations in families of naturally occurring homologous proteins, certain amino acid substitutions are more often tolerated than others, and these are often show correlation with similarities in size, charge, polarity, and hydrophobicity between the original amino acid and its replacement, and such is the basis for defining “conservative substitutions.” Conservative substitutions are herein defined as exchanges within one of the following five groups: Group 1-small aliphatic, nonpolar or slightly polar residues (Ala, Ser, Thr, Pro, Gly); Group 2-polar, negatively charged residues and their amides (Asp, Asn, Glu, Gin); Group 3-polar, positively charged residues (His, Arg, Lys); Group 4-large, aliphatic, nonpolar residues (Met, Leu, lie, Val, Cys); and Group 4-large, aromatic residues (Pine, Tyr, Trp).

[0082] Less conservative substitutions might involve the replacement of one amino acid by another that has similar characteristics but is somewhat different in size, such as replacement of an alanine by an isoleucine residue. Highly nonconservative replacements might involve substituting an acidic amino acid for one that is polar, or even for one that is basic in character. Such radical substitutions cannot, however, be dismissed as potentially ineffective since chemical effects are not totally predictable and radical substitutions might well give rise to serendipitous effects not otherwise predictable from simple chemical principles. Of course, such substitutions may involve structures other than the common L-amino acids. Thus, D-amino acids might be substituted for the L-amino acids commonly found in the antigenic peptides of the invention and yet still be encompassed by the disclosure herein. In addition, amino acids possessing non-standard R groups (i.e., R groups other than those found in the common 20 amino acids of natural proteins) may also be used for substitution purposes to produce immunogens and immunogenic polypeptides according to the present invention.

[0083] If substitutions at more than one position are found to result in a peptide with substantially equivalent or greater immunogenic activity as defined below, then combinations of those substitutions can readily be tested using well-known methods to determine whether the combined substitutions result in additive or syngeneic effects on the immunogenicity of the peptide.

[0084] Based on cytotoxicity assays, an epitope is considered substantially identical to the reference peptide if it has at least 10% of the antigenic activity of the reference peptide as defined by the ability of the substituted peptide to reconstitute the epitope recognized by a CTL in comparison to the reference peptide. Thus, when comparing the lytic activity in the linear portion of the effector: target curves with equimolar concentrations of the reference and substituted peptides, the observed percent specific killing of the target cells incubated with the substituted peptide should be equal to that of the reference peptide at an effector:target ratio that is no greater than 10-fold above the reference peptide effector:target ratio at which the comparison is being made.

[0085] Preferably, when the CTL-specific peptides are tested against the substituted peptides, the peptide concentration at which the substituted peptides achieve half the maximal increase in lysis relative to background is no more than about 1 millimolar, preferably no more than about 1 micromolar, more preferably no more than about 1 nanomolar, and still more preferably no more than about 100 picomolar, and most preferably no more than about 10 picomolar. It is also preferred that the substituted peptide be recognized by CTLs from more than one individual, at least two, and more preferably three individuals.

[0086] Thus, the epitopes of the present invention may be identical to naturally occurring tumor-associated or tumor-specific peptide epitopes or may include epitopes that differ from the reference peptide, as long as they have substantially identical immunogenic activity and can bind to MHC Class I molecules or be processed to bind to MHC molecules.

[0087] The immunogenic peptides and polypeptides of the invention can be prepared synthetically, by recombinant DNA technology, or they can be isolated from natural sources such as tumor cells expressing the parent protein product.

[0088] The polypeptides and oligopeptides disclosed herein can be synthesized in solution or on a solid support in accordance with conventional techniques. Various automated peptide synthesizers are commercially available and can be used in accordance with known protocols. See, for example, (Grant, G. A., Synthetic Peptides: A User's Guide, 1992, W. H. Freeman and Company, New York; Coligan, J. E. et al, Current Protocols in Protein Science, 1999, John Wiley 5 & Sons, Inc., New York). Fragments of polypeptides of the invention can also be synthesized as intermediates in the synthesis of a larger polypeptide.

[0089] Recombinant DNA technology may be employed wherein a nucleotide sequence that encodes an immunogenic peptide or polypeptide of interest is inserted into an expression vector, transformed or transfected into an appropriate host cell, and cultivated under conditions suitable for expression. These procedures are well known in the art to the skilled artisan, as described in (Coligan, J. E. et al, Current Protocols in Immunology, 1999, John Wiley & Sons, Inc., New York; Ausubel, F. M. et al, Current Protocols in Molecular Biology, 1999, John Wiley & Sons, Inc., New York; Molecular Cloning: A Laboratory Manual, 1989, Cold Spring Harbor Laboratory Press, Cold Spring Harbor). Thus, recombinantly produced peptides or polypeptides can be used as the immunogens of the invention.

[0090] The coding sequences for peptides of the length contemplated herein can be synthesized on commercially available automated DNA synthesizers using protocols that are well known in the art. See for example, (Grant, G. A., Synthetic Peptides: A User's Guide, 1992, W. H. Freeman and Company, New York; Coligan, J. E. et al, Current Protocols in Protein Science, 1999, John Wiley & Sons, Inc., New York). The coding sequences can also be modified such that a peptide or polypeptide will be produced that incorporates a desired amino acid substitution. The coding sequence can be provided with appropriate linkers, be ligated into suitable expression vectors that are commonly available in the art, and the resulting DNA or RNA molecule can be transformed or transfected into suitable hosts to produce the desired fusion protein. A number of such vectors and suitable host systems are available, and their selection is left to the skilled artisan. For expression of the fusion proteins, the coding sequence will be provided with operably linked start and stop codons, promoter and terminator regions, and a replication system to provide an expression vector for expression in the desired host cell. For example, promoter sequences compatible with bacterial hosts are provided in plasmids containing convenient restriction sites for insertion of the desired coding sequence. The resulting expression vectors are transformed into suitable bacterial hosts. Of course, yeast, insect, and mammalian host cells may also be used, employing suitable vectors and control sequences. Host cells are genetically engineered (transduced or transformed or transfected) with the vectors of this invention which may be, for example, a cloning vector or an expression vector. The vector may be, for example, in the form of a plasmid, a viral particle, a phage, etc. The engineered host cells can be cultured in conventional nutrient media modified as appropriate for activating promoters, selecting transformants or amplifying the genes of the present invention. The culture conditions, such as temperature, pH and the like, are those previously used with the host cell selected for expression, and will be apparent to the ordinarily skilled artisan.

[0091] More particularly, the present invention also includes recombinant constructs comprising one or more of the sequences as broadly described above. The constructs comprise a vector, such as a plasmid or viral vector, into which a sequence of the invention has been inserted, in a forward or reverse orientation. In a preferred aspect of this embodiment, the construct further comprises regulatory sequences, including, for example, a promoter, operably linked to the sequence. Large numbers of suitable vectors and promoters are known to those of skill in the art, and are commercially available.

[0092] In a further embodiment, the present invention relates to host cells containing the above-described constructs. The host cell can be a higher eukaryotic cell, such as a mammalian cell, or a lower eukaryotic cell, such as a yeast cell, or the host cell can be a prokaryotic cell, such as a bacterial cell.

[0093] Introduction of the construct into the host cell can be effected by calcium phosphate transfection, DEAE-Dextran mediated transfection, or electroporation (Ausubel, F. M. et al, Current Protocols in Molecular Biology, 1999, John Wiley & Sons, Inc., New York; Molecular Cloning: A Laboratory Manual, 1989, Cold Spring Harbor Laboratory Press, Cold Spring Harbor). Such cells can routinely be utilized for assaying CTL activity by having said genetically engineered, or recombinant, host cells express the immunogenic peptides of the present invention. Various mammalian cell culture systems can also be employed to express recombinant protein. Examples of mammalian expression systems include the COS-7 lines of monkey kidney fibroblasts, described by Giuzman, Cell, 23:175 (1981), and other cell lines capable of expressing a compatible vector, for example, the HEK293, NIH3T3, CHO, HeLa and BHK cell lines. Mammalian expression vectors will comprise an origin of replication, a suitable promoter and enhancer, and also any necessary ribosome binding sites, polyadenylation site, splice donor and acceptor sites, transcriptional termination sequences, and 5′ flanking non-transcribed sequences. DNA sequences derived from the SV40 splice, and polyadenylation sites may be used to provide the required nontranscribed genetic elements.

[0094] The polypeptide can be recovered and purified from recombinant cell cultures by methods including ammonium sulfate or ethanol precipitation, acid extraction, anion or cation exchange chromatography, phosphocellulose chromatography, hydrophobic interaction chromatography, affinity chromatography, hydroxylapatite chromatography and lectin chromatography.

[0095] Protein refolding steps can be used, as necessary, in completing configuration of the mature protein. High performance liquid chromatography (HPLC) can be employed for final purification steps.

[0096] Compositions suitable for stimulating an immune response in vivo include immunotherapeutic vaccines with one or more peptides, oligonucleotides or polypeptides of the invention, or with polynucleotides coding for one or more peptides, oligonucleotides or polypeptides of the invention, can be accomplished using any of a variety of antigen delivery systems well known in the art that direct the peptides, oligonucleotides or polypeptides to the site of lymphoid cells where the selected immunogens are directly exposed to antigen presenting cells in order to elicit a CTL response against the vaccine components in vivo in the patient. Examples of delivery vehicles include liposomes, bacterial and viral vectors and heat shock proteins. Adjuvants include but are not limited to GM-CSF (Granulocyte Monocyte Colony Stimulating Factor), Listeria, LAG3 and heat shock proteins. Recombinant or synthetic peptides of the invention may be mixed with an adjuvant and directly injected into the patient. Thus, one or more peptides of the invention can be provided to antigen presenting cells in such a fashion that the peptides associate with class I MHC molecules and are presented on the surface of the antigen presenting cell, and consequently are available to stimulate a CTL response, against cancer cells, and preferably against cancer stem cells.

[0097] The immunogenic peptides of the present invention may be used to elicit CTLs ex vivo from either healthy individuals or from cancer patients with cancers such as ovarian carcinoma, breast carcinoma, colorectal carcinoma, lung carcinoma, or prostate carcinoma. Such responses are induced by incubating in tissue culture the individual's CTL precursor lymphocytes together with a source of antigen presenting cells and the appropriate immunogenic peptide. Examples of suitable antigen presenting cells include dendritic cells, macrophages, and activated B cells. Typically, the peptide at concentrations between 10 and 40 ug/ml would be pre-incubated with the antigen presenting cells for periods ranging from 1 to 18 hours. Beta-2-microglobulin (4 g/ml) can be added during this time period to enhance binding. The antigen presenting cells may also be held at room temperature during the incubation period (Ljunggren, H.-G. et al., Nature, 346:476-480, (1990)) or pretreated with acid (Zeta, H. J., Lil et al., Hum. Immunol., 39:79-86, (1994)) to promote the generation of denatured class I MHC molecules which can then bind the peptide. The precursor CTLs (responders) are then added to the antigen presenting cells to which the immunogenic peptide has bound (stimulators) at responder to stimulator ratios of between 5:1 and 50:1, and most typically between 10:1 and 20:1. The co cultivation of the cells is carried out at 37° C. in RPMI 1640, 10% fetal bovine serum, 2 mM L-glutamine, and IL-2 (5-20 Units/ml). Other cytokines, such as IL-1, IL-7, and IL-12 may also be added to the culture.

[0098] Fresh IL-2-containing media is added to the cultures every 2-4 days, typically by removing one-half the old media and replenishing it with an equal volume of fresh media. After 7-10 days, and every 7-10 days thereafter, the CTL are re-stimulated with antigen presenting cells to which immunogenic peptide has been bound as described above. Fresh IL-2-containing media is added to the cells throughout their culture as described above. Three to four rounds of stimulation, and sometimes as many five to eight rounds of stimulation, are required to generate a CTL response that can then be measured in vitro. The above-described protocol is illustrative only and should not be considered limiting.

[0099] Many in vitro CTL stimulation protocols have been described and the choice of which one to use is well within the knowledge of the skilled artisan. The peptide-specific CTL can be further expanded to large numbers by treatment with anti-CD3 antibody. For example, see (Riddell, S. R. and Greenberg, P. D., J. Immunol. Methods, 128:189-201, (1990); Walter, E. A. et al., N. Engl. J. Med., 333:1038-1044, (1995)).

[0100] Antigen presenting cells that are to be used to stimulate a CTL response are typically incubated with peptide of an optimal length, most commonly a nonapeptide, that allows for direct binding of the peptide to the class I MHC molecule without additional processing. Larger oligopeptides and polypeptides are generally ineffective in binding to class I MHC molecules as they are not efficiently processed into an appropriately sized peptide in the extracellular milieu. However, a variety of approaches are known in the art that allow oligopeptides and polypeptides to be exogenously acquired by a cell, which then allows for their subsequent processing and presentation by a class I MHC molecule.

[0101] Representative, but non-limiting examples of such approaches include electroporation of the molecules into the cell (Harding, C. H. III, Eur. J. Immunol., 22:1865-1869, (1992)), encapsulation of the molecules in liposomes which are fused to the cells of interest (Ready, R. et al., J. Immunol. Methods, 141:157-163, (1991)), or osmotic shock, in which the molecules are taken up via pinocytosis (Moore, M. W. et al., Cell, 54:777-785, (1988)). Thus, oligopeptides and polypeptides that comprise one or more of the peptides of the invention can be provided to antigen presenting cells in such a fashion that they are delivered to the cytoplasm of the cell, and are subsequently processed to allow presentation of the peptides by MHC molecules.

[0102] Antigen presenting cells suitable for stimulating an in vitro CTL response that is specific for one or more of the peptides of the invention can also be prepared by introducing polynucleotide vectors encoding the sequences into the cells. These polynucleotides can be designed such that they express only a single peptide of the invention, multiple peptides of the invention, or even a plurality of peptides of the invention. A variety of approaches are known in the art that allow polynucleotides to be introduced and expressed in a cell, thus providing one or more peptides, oligopeptides or polypeptides of the invention to the class I MHC molecule binding pathway. Representative, but non-limiting examples of such approaches include the introduction of plasmid DNA through particle-mediated gene transfer or electroporation (Tuting, T. et al., J. Immunol., 160:1139-1147, (1998)), or the transduction of cells with an adenovirus expressing the polynucleotide of interest (Perez-Diez, A. et al., Cancer Res., 58:5305-5309, (1998)). Thus, oligonucleotides that code for one or more of the peptides, oligopeptides or polypeptides of the invention can be provided to antigen presenting cells in such a fashion that the peptides associate with class I MHC molecules and are presented on the surface of the antigen presenting cell, and consequently are available to stimulate a CTL response.

[0103] By preparing the stimulator cells used to generate an in vitro CTL response in different ways, it is possible to control the peptide specificity of CTL response. For example, the CTL generated with a particular peptide will necessarily be specific for that peptide. Likewise, CTL that are generated with a polypeptide or polynucleotide expressing or coding for particular peptides will be limited to specificities that recognize those peptides. More broadly, stimulator cells, and more specifically dendritic cells, can be incubated in the presence of the parent protein. As a further alternative, stimulator cells, and more specifically dendritic cells, can be transduced or transfected with RNA or DNA comprising the polynucleotide sequence encoding the protein. Under these alternative conditions, peptide epitopes that are naturally cleaved out of the protein can associate with an appropriate class I MHC molecule. The selection of antigen presenting cells and the type of antigen with which to stimulate the CTL is left to the ordinary skilled artisan.

[0104] In specific embodiments, the methods of the present invention include a method for inducing a CTL response in vitro that is specific for a tumor cell, whereby the method comprises contacting a CTL precursor lymphocyte with an antigen presenting cell that has bound an immunogen comprising one or more of the peptides disclosed according to the invention.

[0105] In specific embodiments, the methods of the present invention include a method for inducing a CTL response in vitro, preferably for a cancer stem cell, whereby the method comprises contacting a CTL precursor lymphocyte with an antigen presenting cell that has exogenously acquired an immunogenic oligopeptide or polypeptide that comprise one or more of the peptides disclosed according to the invention.

[0106] In specific embodiments, the methods of the present invention include method for inducing a CTL response in vivo, preferably for a cancer stem cell, whereby the method comprises contacting a CTL precursor lymphocyte with an antigen presenting cell that has endogenously acquired an immunogenic oligopeptide or polypeptide that comprise one or more of the peptides disclosed according to the invention.

[0107] A yet additional embodiment of the present invention is directed to a process for inducing a CTL response in vitro that is specific for a tumor cell, preferably for a cancer stem cell, comprising contacting a CTL precursor lymphocyte with an antigen presenting cell that is expressing a polynucleotide coding for a polypeptide of the invention and wherein said polynucleotide is operably linked to a promoter.

[0108] A yet additional embodiment of the present invention is directed to a process for inducing a CTL response in vivo that is specific for a tumor cell, preferably for a cancer stem cell, comprising contacting a CTL precursor lymphocyte with an antigen presenting cell that is expressing a polynucleotide coding for a polypeptide of the invention and wherein said polynucleotide is operably linked to a promoter.

[0109] A variety of techniques exist for assaying the activity of CTL. These techniques include the labeling of target cells with radionuclides such as Na²⁵CrO4 or ³H-thymidine, and measuring the release or retention of the radionuclides from the target cells as an index of cell death. Such assays are well known in the art and their selection is left to the skilled artisan.

[0110] Alternatively, CTL are known to release a variety of cytokines when they are stimulated by an appropriate target cell, such as a tumor cell expressing the relevant class I MHC molecule and the corresponding peptide. Non-limiting examples of such cytokines include IFN-gamma, TNFoc, and GM-CSF. Assays for these cytokines are well known in the art, and their selection is left to the skilled artisan. Methodology for measuring both target cell death and cytokine release as a measure of CTL reactivity are given in (Coligan, Jo E. et al, 25 Current Protocols in Immunology, 1999, John Wiley & Sons, Inc., New York).

[0111] After expansion of the antigen-specific CTL in vitro, the latter are then adoptively transferred back into the patient, where they will destroy their specific target cell. The utility of such adoptive transfer is demonstrated in (Dudley M. et al. Science 25; 298(5594):850-854 (2002); North, R. J. et al., Infect. Immun., 67:2010-2012, (1999); Ridden, S. R. et al., Science, 257:238-241, (1992)). In determining the amount of cells to reinfuse, the skilled physician will be guided by the total number of cells available, the activity of the CTL as measured in vitro, and the condition of the patient.

[0112] Preferably, however, about 1×10⁶ to about 1×10⁴², more preferably about 1×10⁸ to about 1×10⁴⁴, and even more preferably, about 1×10⁹ to about 1×10⁴⁰ peptide-specific CTL are infused. Methodology for reinfusing the T cells into a patient are well known and exemplified in U.S. Pat. No. 4,844,893 to Honski, et al., and U.S. Pat. No. 4,690,915 to Rosenberg.

[0113] The peptide-specific CTL can be purified from the stimulator cells prior to infusion into the patient. For example, monoclonal antibodies directed toward the cell surface protein CD8, present on CTL, can be used in conjunction with a variety of isolation techniques such as antibody panning, flow cytometric sorting, and magnetic bead separation to purify the peptide specific CTL away from any remaining non-peptide specific lymphocytes or from the stimulator cells. These methods are well known in the art, and their selection is left to the skilled artisan. It should be appreciated that generation of peptide-specific CTL in this manner obviates the need for stimulating the CTL in the presence of tumor. Thus, there is no chance of inadvertently reintroducing tumor cells into the patient.

[0114] Thus, one embodiment of the present invention relates to a process for treating a subject with cancer characterized by cancer stem cells whereby CTL produced in vitro according to the present invention are administered in an amount sufficient to destroy the tumor cells through direct lysis or to effect the destruction of the tumor cells indirectly through the elaboration of cytokines.

[0115] Another embodiment of the present invention is directed to a process for treating a subject with cancer characterized by cancer stem cells expressing any class I MHC molecule and an associated epitope, whereby the CTLs are produced in vitro and are specific for the epitope or parent protein and are administered in an amount sufficient to destroy the tumor cells through direct lysis or to effect the destruction of the tumor cells indirectly through the elaboration of cytokines.

[0116] Thus, one embodiment of the present invention relates to a process for treating a subject with cancer characterized by cancer stem cells whereby CTLs produced in vitro according to the present invention are administered in an amount sufficient to destroy the tumor cells, and preferably cancer stem cells through direct lysis or to effect the destruction of the tumor cells indirectly through the elaboration of cytokines.

[0117] Another embodiment of the present invention is directed to a an immunization process for treating a subject with cancer characterized by cancer stem cells expressing any class I MHC molecule and an associated epitope, whereby the CTLs are produced in vivo and are specific for an epitope or epitopes derived from an oligopeptide or polypeptide administered to the patient in a fashion such that the tumor cells, and preferably cancer stem cells, are destroyed through direct lysis or to effect the destruction of the tumor cells indirectly through the elaboration of cytokines.

[0118] In the foregoing embodiments the cancer to be treated may include any cancer, including but not limited to an ovarian carcinoma, breast carcinoma, a colorectal carcinoma, lung carcinoma, heptaocellular carcinoma and prostate carcinoma.

[0119] Ex vivo-generated CTL can be used to identify and isolate the T cell receptor molecules specific for the peptide. The genes encoding the alpha and beta chains of the T cell receptor can be cloned into an expression vector system and transferred and expressed in naive T cells from peripheral blood, T cells from lymph nodes, or T lymphocyte progenitor cells from bone marrow. These T cells, which would then be expressing a peptide-specific T cell receptor, would then have anti-tumor reactivity and could be used in adoptive therapy of cancer, and more specifically cancer, colorectal carcinoma, ovarian carcinoma, lung carcinoma, and prostate carcinoma.

[0120] In addition to their use for therapeutic or prophylactic purposes, the immunogenic peptides of the present invention are useful as screening and diagnostic agents. Thus, the immunogenic peptides of the present invention, together with modem techniques of gene or antibody screening, make it possible to screen patients for the presence of genes encoding such peptides or proteins from cells obtained by biopsy of tumors detected in such patients. The results of such screening may help determine the efficacy of proceeding with the regimen of treatment disclosed herein using the immunogens of the present invention to target and eliminate cancer cells, preferably cancer stem cells.

[0121] Alternatively, the immunogenic peptides disclosed herein, as well as functionally similar homologs thereof, may be used to screen a sample for the presence of CTLs that specifically recognize the corresponding epitopes. The lymphocytes to be screened in this assay will normally be obtained from the peripheral blood, but lymphocytes can be obtained from other sources, including lymph nodes, spleen, tumors, and pleural fluid.

[0122] The peptides of the present invention may then be used as a diagnostic tool to evaluate the efficacy of the immunotherapeutic treatments disclosed herein. Thus, the in vitro generation of CTL as described above would be used to determine if patients are likely to respond to the peptide in vivo. Similarly, the in vitro generation of CTL could be accomplished with samples of lymphocytes obtained from the patient before and after treatment with the peptides. Successful generation of CTL in vivo should then be recognized by a correspondingly easier ability to generate peptide-specific CTL in vitro from lymphocytes obtained following treatment in comparison to those obtained before treatment. The oligopeptides of the invention can also be used to prepare class I MHC tetramers which can be used in conjunction with flow cytometry to quantitate the frequency of peptide-specific CTL that are present in a sample of lymphocytes from an individual.

[0123] Specifically, for example, class I MHC molecules and associated peptides would be combined to form tetramers as exemplified in U.S. Pat. No. 5,635,363. Said tetramers would find use in monitoring the frequency of CTLs specific for the peptide or peptides in the peripheral blood, lymph nodes, or tumor mass of an individual undergoing immunotherapy with the peptides, oligopeptides, polypeptides, or polynucleotides of the invention, and it would be expected that successful immunization would lead to an increase in the frequency of the peptide-specific CTL.

[0124] As stated above, a vaccine in accordance with the present invention may include one or more of the hereinabove described polypeptides or active fragments thereof, or a mixture, composition, or pool, of immunogenic peptides, oligopeptides or polypeptides disclosed herein. When employing more than one polypeptide or active fragment, two or more polypeptides and/or active fragments may be used as a physical mixture or as a fusion of two or more polypeptides or active fragments. The fusion fragment or fusion polypeptide may be produced, for example, by recombinant techniques or by the use of appropriate linkers for fusing previously prepared polypeptides or active fragments.

[0125] The immunogenic molecules of the invention, including vaccine compositions, may be utilized according to the present invention for purposes of preventing, suppressing or treating diseases causing the expression of the immunogenic peptides disclosed herein, such as where the antigen is being expressed by tumor cells and in particular by cancer stem cells. As used in accordance with the present invention, the term “prevention” relates to a process of prophylaxis in which an animal, especially a mammal, and most especially a human, is exposed to an immunogen of the present invention prior to the induction or onset of the disease process. This could be done where an individual has a genetic pedigree indicating a predisposition toward occurrence of the disease condition to be prevented. For example, this might be true of an individual whose ancestors show a predisposition toward certain types of cancer.

[0126] Alternatively, the immunogen could be administered to the general population as is frequently done for infectious diseases. Alternatively, the term “suppression” is often used to describe a condition wherein the disease process has already begun but obvious symptoms of said condition have yet to be realized. Thus, the cells of an individual may have become cancerous but no outside signs of the disease have yet been clinically recognized. In either case, the term prophylaxis can be applied to encompass both prevention and suppression. Conversely, the term “treatment” is often utilized to mean the clinical application of agents to combat an already existing condition whose clinical presentation has already been realized in a patient.

[0127] This would occur where an individual has already been diagnosed as having a tumor. It is understood that the suitable dosage of an immunogen of the present invention will depend upon the age, sex, health, and weight of the recipient, the kind of concurrent treatment, if any, the frequency of treatment, and the nature of the effect desired. However, the most preferred dosage can be tailored to the individual subject, as determined by the researcher or clinician. The total dose required for any given treatment will commonly be determined with respect to a standard reference dose as set by a manufacturer, such as is commonly done with vaccines, such dose being administered either in a single treatment or in a series of doses, the success of which will depend on the production of a desired immunological result (i.e., successful production of a CTL-mediated response to the antigen, which response gives rise to the prevention and/or treatment desired). Thus, the overall administration schedule must be considered in determining the success of a course of treatment and not whether a single dose, given in isolation, would or would not produce the desired immunologically therapeutic result or effect.

[0128] The therapeutically effective amount of a composition containing one or more of the immunogens of this invention is an amount sufficient to induce an effective CTL response to the immunogen and to cure or arrest disease progression. Thus, this dose will depend, among other things, on the identity of the immunogens used, the nature of the disease condition, the severity of the disease condition, the extent of any need to prevent such a condition where it has not already been detected, the manner of administration dictated by the situation requiring such administration, the weight and state of health of the individual receiving such administration, and the sound judgment of the clinician or researcher. Thus, for purposes of prophylactic or therapeutic administration, effective amounts would generally lie within the range of from 1.0 ug to about 5,000 ug of peptide for a 70 kg patient, followed by boosting dosages of from about 1.0 ug to about 1,000 ug of peptide pursuant to a boosting regimen over days, weeks or even months, depending on the recipient's response and as necessitated by subsequent monitoring of CTL-mediated activity within the bloodstream. Of course, such dosages are to be considered only a general guide and, in a given situation, may greatly exceed such suggested dosage regimens where the clinician believes that the recipient's condition warrants more aggressive administration schedule.

[0129] Needless to say, the efficacy of administering additional doses, and of increasing or decreasing the interval, may be re-evaluated on a continuing basis, in view of the recipient's immunocompetence (for example, the level of CTL activity with respect to tumor-associated or tumor-specific antigens).

[0130] For such purposes, the immunogenic compositions according to the present invention may be used against a disease condition such as cancer by administration to an individual by a variety of routes. The composition may be administered parenterally or orally, and, if parenterally, either systemically or topically. Parenteral routes include subcutaneous, intravenous, intradermal, intramuscular, intraperitoneal, intranasal, transdermal, or buccal routes. One or more such routes may be employed. Parenteral administration can be, for example, by bolus injection or by gradual perfusion over time.

[0131] Generally, vaccines are prepared as injectables, in the form of aqueous solutions or suspensions. Vaccines in an oil base are also well known such as for inhaling. Solid forms which are dissolved or suspended prior to use may also be formulated. Pharmaceutical carriers, diluents and excipients are generally added that are compatible with the active ingredients and acceptable for pharmaceutical use. Examples of such carriers include, but are not limited to, water, saline solutions, dextrose, or glycerol. Combinations of carriers may also be used. These compositions may be sterilized by conventional, well known sterilization techniques including sterile filtration. The resulting solutions may be packaged for use as is, or the aqueous solutions may be lyophilized, the lyophilized preparation being combined with sterile water before administration.

[0132] Vaccine compositions may further incorporate additional substances to stabilize pH, or to function as adjuvants, wetting agents, or emulsifying agents, which can serve to improve the effectiveness of the vaccine.

[0133] The concentration of the CTL stimulatory peptides of the invention in pharmaceutical formulations necessary to elicit a tumor rejection response are subject to wide variation, including anywhere from less than 0.01% by weight to as much as 50% or more. Factors such as volume and viscosity of the resulting composition must also be considered. The solvents, or diluents, used for such compositions include water, possibly PBS (phosphate buffered saline), or saline itself, or other possible carriers or excipients.

[0134] The immunogens of the present invention may also be contained in artificially created delivery vehicles such as liposomes, Immunostimulating Complexes (ISCOMS), slow-releasing particles, and other vehicles that increase the immunogenicity and/or half-life of the peptides or polypeptides in serum. Liposomes include emulsions, foams, micelles, insoluble monolayers, liquid crystals, phospholipid dispersions, lamellar layers and the like. Liposomes for use in the invention are formed from standard vesicle-forming lipids which generally include neutral and negatively charged phospholipids and a sterol, such as cholesterol. The selection of lipids is generally determined by considerations such as liposome size and stability in the blood. A variety of methods is available for preparing liposomes as reviewed, for example, by (Coligan, J. E. et al, Current Protocols in Protein Science, 1999, John Wiley & Sons, Inc., New York) and see also U.S. Pat. Nos. 4,235,871, 4,501,728, 4,837,028, and 5,019,369.

[0135] Delivery vehicles containing the peptides or polypeptides of the invention can be directed to the site of lymphoid cells where the vehicles deliver the selected immunogens directly to antigen presenting cells. Targeting can in some cases be achieved by incorporating additional molecules such as proteins or polysaccharides into the outer membranes of said structures, thus resulting in the delivery of the structures to particular areas of the body, or to particular cells within a given organ or tissue. Such targeting molecules may include a molecule that binds to receptor on antigen presenting cells. For example an antibody that binds to CD80 could be used to direct liposomes to dendritic cells.

[0136] The immunogens of the present invention may also be administered as solid compositions. Conventional nontoxic solid carriers including pharmaceutical grades of mannitol, lactose, starch, magnesium, cellulose, glucose, sucrose, sodium saccharin, and the like. Such solid compositions will often be administered orally, whereby a pharmaceutically acceptable nontoxic composition is formed by incorporating the peptides and polypeptides of the invention with any of the carriers listed above. Generally, such compositions will contain 10-95% active ingredient, and more preferably 25-75% active ingredient. Aerosol administration is also an alternative, requiring only that the immunogens be properly dispersed within the aerosol propellant. Typical percentages of the peptides or polypeptides of the invention are 0.01%-20% by weight, preferably 1%-10%. The use of a surfactant to properly disperse the immunogen may be required. Representative surfactants include the esters or partial esters of fatty acids containing from 6 to 22 carbon atoms, such as caproic, octanoic, lauric, palmitic, stearic, linoleic, linolenic, olesteric and oleic acids with an aliphatic polyhydric alcohol or its cyclic anhydride.

[0137] Mixed esters, such as mixed or natural glycerides may be employed. The surfactant may constitute 0.1-20% by weight of the composition, preferably 0.25-5%. Typical propellants for such administration may include esters and similar chemicals but are by no means limited to these. A carrier, such as lecithin for intranasal delivery, may also be included.

[0138] The peptides and polypeptides of the invention may also be delivered with an adjuvant. Adjuvants include, but are not limited to complete or incomplete Freund's adjuvant, Montanide ISA-51, aluminum phosphate, aluminum hydroxide, alum, and saponin. Adjuvant effects can also be obtained by injecting a variety of cytokines along with the immunogens of the invention. These cytokines include, but are not limited to IL-1, IL-2, IL-7, IL-12, and GM-CSF.

[0139] The peptides and polypeptides of the invention can also be added to professional antigen presenting cells such as dendritic cells that have been prepared ex vivo. For example, the dendritic cells could be prepared from CD34 positive stem cells from the bone marrow, or they could be prepared from CD14 positive monocytes obtained from the peripheral blood. The dendritic cells are generated ex vivo using cytokines such as GM-CSF, IL-3, IL-4, TNF, and SCF. The cultured DC are then pulsed with peptides at various concentrations using standard methods that are well known in the art. The peptide-pulsed dendritic cells can then be administered intravenously, subcutaneously, or intradermally, and the immunization may also include cytokines such as IL-2 or IL-12.

[0140] The present invention is also directed to a vaccine in which an immunogen of the present invention is delivered or administered in the form of a polynucleotide encoding a polypeptide or active fragment as disclosed herein, whereby the peptide or polypeptide or active fragment is produced in vivo. The polynucleotide may be included in a suitable expression vector and combined with a pharmaceutically acceptable carrier.

[0141] For example, the peptides or polypeptides could be expressed in plasmid DNA and nonreplicative viral vectors such as vaccinia, fowlpox, Venezuelan equine encephalitis virus, adenovirus, or other RNA or DNA viruses. These examples are meant to be illustrative only and should not be viewed as self-limiting. A variety of other vectors is available and apparent to those skilled in the art from the description given herein. In this approach, a portion of the nucleotide sequence of the viral vector is engineered to express the peptides or polypeptides of the invention. Vaccinia vectors and methods useful in immunization protocols are described in U.S. Pat. No. 4,722,848, the disclosure of which is incorporated herein by reference in its entirety.

[0142] Regardless of the nature of the composition given, additional therapeutic agents may also accompany the immunogens of the present invention. Thus, for purposes of treating tumors, compositions containing the immunogens disclosed herein may, in addition, contain other antitumor pharmaceuticals such as small molecule therapeutics or monoclonal antibodies. The use of such compositions with multiple active ingredients is left to the discretion of the clinician.

[0143] In addition, certain immunogens of the present invention can be used to stimulate the production of antibodies for use in passive immunotherapy, for use as diagnostic reagents, and for use as reagents in other processes such as affinity chromatography.

[0144] The present invention also relates to antibodies that react with immunogens, such as a polypeptide that comprises within it one or more stretches comprising the sequence of an MHC-associated peptide or oligopeptide. Active fragments of such antibodies are also specifically contemplated. Such antibodies, and active fragments of such antibodies, for example, and Fab structure, may react with, including where it is highly selective or specific for, an immunogenic structure comprising two, three, four or more of the epitopic peptides of the invention, or polypeptides of the invention. Thus, the present invention also relates to a process of using antibodies to elicit an immune response, including the production of protective antibodies, following administration of immunogens of the invention to an immunocompetent animal (i.e., an animal whose immune system has not been compromised, either naturally or experimentally, so as to not exhibit such a reaction, such as a knock-out animal or the like).

[0145] With the advent of methods of molecular biology and recombinant technology, it is now possible to produce antibody molecules by recombinant means and thereby generate gene sequences that code for specific amino acid sequences found in the polypeptide structure of the antibodies. Such antibodies can be produced by either cloning the gene sequences encoding the polypeptide chains of said antibodies or by direct synthesis of said polypeptide chains, with in vitro assembly of the synthesized chains to form active tetrameric (H2L2) structures with affinity for specific epitopes and antigenic determinants. This has permitted the ready production of antibodies having sequences characteristic of neutralizing antibodies from different species and sources.

[0146] The antibodies disclosed according to the invention may also be wholly synthetic, wherein the polypeptide chains of the antibodies are synthesized and, possibly, optimized for binding to the polypeptides disclosed herein as being receptors. Such antibodies may be chimeric or humanized antibodies and may be fully tetrameric in structure, or may be dimeric and comprise only a single heavy and a single light chain. Such antibodies may also include fragments, such as Fab and F(ab2)′ fragments, capable of reacting with and binding to any of the polypeptides disclosed herein as being receptors. The invention also contemplates the use of very small antibodies, such as ‘nanobodies’ that are capable of specifically binding to antigenic targets.

[0147] Regardless of the source of the antibodies, or how they are produced, in vitro or in vivo, using transgenic animals, such as cows, goats and sheep, or using cell culture or using direct chemical synthesis employing no living organisms at any stage of the process, all antibodies have a similar overall three-dimensional structure. This structure is often given as H2L2 and refers to the fact that antibodies commonly comprise two light (L) amino acid chains and two heavy (H) amino acid chains. Both chains have regions capable of interacting with a structurally complementary antigenic target. The regions interacting with the target are referred to as “variable” or “V” regions and are characterized by differences in amino acid sequence from antibodies of different antigenic specificity. The variable regions of either H or L chains contain the amino acid sequences capable of specifically binding to antigenic targets. Within these sequences are smaller sequences dubbed “hypervariable” because of their extreme variability between antibodies of differing specificity. Such hypervariable regions are also referred to as “complementarily determining regions” or “CDR” regions. These CDR regions account for the basic specificity of the antibody for a particular antigenic determinant structure.

[0148] In all mammalian species, antibody polypeptides contain constant (i.e., highly conserved) and variable regions, and, within the latter, there are the CDRs and the so-called “framework regions” made up of amino acid sequences within the variable region of the heavy or light chain but outside the CDRs.

[0149] A further embodiment of the present invention relates to a method for inducing a CTL response in a subject comprising administering to subjects an effective (i.e., CTL-stimulating amount) of an immunogen of the invention that does not comprise the entire protein expressing the epitopic peptides disclosed herein (i.e., one that comprises less than the entire source protein where the protein is a naturally occurring polypeptide) in an amount sufficient to induce a CTL response to tumor cells, more specifically against cancer stem cells, thereby eliciting a cellular response against said tumor cells.

[0150] A still further embodiment of the present invention relates to a method for inducing a CTL response in a subject, wherein the immunogen is in the form of a polynucleotide. In one non-limiting example, the method comprises administering to subjects at least one CTL epitope, wherein said epitope or epitopes are selected from a group comprising the peptides disclosed according to the invention, and are coded within a polynucleotide sequence that does not comprise the entire protein coding region, in an amount sufficient to induce a CTL response to tumor cells, more specifically in cancer stem cells.

[0151] CSC may be isolated from primary tumor tissues, pleural effusions (Al-Hajj, M., M. S. Wicha, A. Benito-Hemandez, S. J. Morrison, and M. F. Clarke. Proc Natl Acad Sci USA 100:39832 (2003.)) or from established breast cancer cell lines, such as SKBR3, MDA 231, and MCF7 (Ponti, D., A. Costa, N. Zaffaroni, G. Pratesi, G. Petrangolini, D. Coradini, S. Pilotti, M. A. Pierotti, and M. G. Daidone. Cancer Res 65:55063 (2005.)). Isolated CSC are characterized by flow cytometry using cell surface markers appropriate for each tumor type and known to those skilled in the art. The cells may be expanded in vitro or in SCID mice for MHC peptide analysis. CD34+ stem cell populations can be obtained from GSF-mobilized healthy human peripheral blood, cord blood or other such sources, and expanded if necessary with cytokines to obtain 10⁸ cells using procedures known to those skilled in the art. Cell populations can comprise any HLA type.

[0152] As a nonlimiting example, human breast cancer patient malignant effusions may be obtained by subjecting the fluid to ficol separation to remove debris and red blood cell contamination. Typical yields of cells range from 200 million to 2 trillion cells per liter of fluid. For tumor cell lines, the cells are cultured in RPMI 1640 medium supplemented with 10% FCS, pen-strep-glutamine, or other suitable media. Antibody-labeled cells may be isolated by FACS sorting or alternatively by using antibody-coated magnetic beads. Flow cytometric staining for breast tumor stem cell phenotypic analysis is used to identify lineage negative (CD2, 3,10,16,18,31,45, 64,140b), CD44+-FITC labeled antibody/CD24lo PerCP labeled antibody from human breast cancer patient pleural effusions. For breast tumor cell lines, analysis does not require the extensive array of lineage negative markers, since there is no blood cell contamination of these samples and simply using CD44+, CD24-/lo is sufficient. The first step in cell sorting of CSC populations from malignant effusions is to use antibodies to deplete the lineage markers (CD2, 3, 10,16,18,31, 45, 64,140b), to greatly reduce the number of non-CSC cells and thereby reduce the cell sorting time. This is followed by sorting of the cells based on markers for CD44+/CD24lo. Sorted cells may then be cultured in vitro or alternatively used for in vivo experiments by implantation into SCID mice.

[0153] CD34 positive cells are purified from GSF mobilized PBL or cord blood using anti-CD34 antibody coated magnetic beads to obtain purified CD34+ cells and then cell sorted to obtain the CD38neg fraction. In vitro expansion is performed using established methods (Lam, A. C., K. Li, X. B. Zhang, C. K. Li, T. F. Fok, A. M. Chang, A. E. James, K. S. Tsang, and P. M. Yuen. Transfusion 41:1567 (2001); Li, K., C. K. Li, C. K. Chuen, K. S. Tsang, T. F. Fok, A. E. James, S. M. Lee, M. M. Shing, K. W. Chik, and P. M. Yuen. Eur J Haematol 74:128 (2005)).

[0154] Expansion (10⁸-10⁹) is performed either in cell culture or in SCID mice, for example, (Al-Hajj et al. Proc Natl Acad Sci 100:3983 (2003)). If cell lines are expanded using cell culture, their tumorigenicity may additionally be validated in vivo by implantation in SCID mice using methods known to those skilled in the art. At the end of the expansion period, the percentage of cells retaining the cancer stem cell phenotype is assessed.

[0155] MHC peptide complexes are isolated from cells using immunoaffinity purification. First, cell lysates are prepared from by homogenization and freeze/thaw in buffer containing 1.0% NP40; preferably about 1-5×10⁸ cells are used. The lysates are cleared by centrifugation at 2000 rpm for 30 minutes to remove the cell debris. MHC/peptide complexes are isolated by immunoaffinity chromatography using W632 (monoclonal antibody recognizing pan MHC class I molecule) antibody coated protein A/G beads (UltraLink Immobilized Protein A/G, Pierce, Rockford, Ill.) or equivalent, to isolate pan MHC Class I/peptide complexes. Protein A/G beads are washed with low pH buffer followed by PBS rinses. The beads are then incubated with 0.5 mg W632 antibody at room temperature for 2 hours. Labeled beads are washed three times to remove unbound antibodies. The antibody-coated beads are added to the prepared cell lysate. The mixture is incubated for two hours at room temperature with continuous rocking. The beads are separated from the lysate by centrifuging at 1000 rpm for 5 minutes. The recovered lysate is incubated for an additional 2 hours at room temperature with another set of prepared antibody coated Protein A/G beads. The bound MHC complexes are eluted from the beads by the addition of 0.1% Trifluoroacetic acid, (TFA), pH 1.5, 200 μl of TFA, the beads are centrifuged, and the supernatant removed. This process is repeated three times to give a final volume of 600 μl. The eluate is then boiled for 5 minutes to denature the proteins, after which, it is dried down to almost dryness using a speed-vac and reconstituted to 50 μl or appropriate volume with SEC running buffer.

[0156] Peptide mixtures are purified to eliminate any components that may have non-specifically bound to the antibodies during the aforementioned purification step. Fractions are first reduced to one half their volumes using vacuum centrifugation without heat. They are then diluted to 100 microliters with 5% triethylamine in 50/50 isopropyl alcohol/water. This mixture is placed into a separate 0.1 micron spin filter containing approximately 10 micrograms of isothiocyanato glass (DITC) and allowed to incubate for 45 minutes at 45° C. with gentle shaking. Only chemical molecules containing primary amines, such as the N-terminus of a peptide, react and covalently bind to the DITC-derivatized glass. All filter units then undergo centrifugation at 10,000 rpm for 2 minutes. The filtrate volume containing the unbound material is discarded. The DITC glass is washed several times with organic and ionic buffers at neutral pH; the wash solution is filtered and discarded. Finally, the peptides are released from the DITC glass by the addition of 100 microliters of TFA with incubating for 10 minutes at 45° C. with gentle shaking. The filter unit is then spun at 10,000 rpm for 2 minutes to separate the peptides from the DITC glass, the filtrate, containing the peptides, are collected and saved.

[0157] The purified peptide mixture first undergoes size exclusion chromatography (SEC) in order to separate any proteins from the peptides. SEC is performed on an ABI 140B LC system flowing at 250 ul/min in isocratic mode with an ABI 785A UV detector monitoring at 254 nm. A Zorbax GF-250 4.6×250 mm (Agilent, Palo Alto, Calif.) column is used with a mobile phase consisting of 1% acetic acid (˜pH 3.5)+10% acetonitrile. The peptide-containing fraction is collected from 14 minutes to 18 minutes as determined by a calibration mix injection. The peptide-containing fraction then undergoes a first dimension fractionation via HPLC. A 1 mm×250 mm PLRP-S 100A° Polymer column is then used with an ABI 140B LC system flowing at 50 ul/min in gradient mode with an ABI 785A UV detector monitoring at 214 nm. Solvent A is 2% ACN in H₂O+0.1% TFA and solvent B is 80% ACN in H₂O+0.09% TFA using a gradient of 2% B to 60% B in 60 minutes. Fractions are collected at one-minute intervals and further processed for mass spectrometry analysis.

[0158] Peptides are sequenced by the technique of Collision Activated Dissociation (CAD) on an ion trap mass spectrometer equipped with on-line microcapillary HPLC and a microspray ionization source. Each HPLC fraction is loaded onto the microcapillary HPLC column, fractionated, and eluted directly into the electrospray ionization source. The microcapillary column (75 um×100 mm) is packed with C-18 separation resin. Solvent A is 2% ACN in H₂O+1% acetic acid and solvent B is 80% ACN in H₂O+1% acetic acid, using a gradient of 2% B to 60% B in 240 minutes at a flow rate of 200 nl/min achieved via splitting flow from a Eldex micro pumping system (Eldex, Napa, Calif.). The mass spectrometer is configured such that a full mass scan (spectra) is acquired about every 10 seconds. From the spectra, the computer selects the 5 most abundant peaks and performs a CAD scan on each of the 5 peaks. Over the course of 4 hours, for a single HPLC fraction, approximately 1400 full scans and 7000 CAD scans are acquired.

[0159] CAD spectra are searched against databases using search program software in order to interpret the data and derive peptide sequences. The reduced spectrum sets are then be searched against a non-redundant human genomic database using SeQuest, Mascot and Scaffold software. Results are returned as a confidence score, which is then be manually verified. CAD mass spectra are used to search various genomic databases to find potential sequences for the candidate peptides and to identify the protein of origin of these peptides. The search results are assembled as a dataset for comparison studies.

[0160] While the examples below are provided to illustrate the invention, it is to be understood that these methods and examples in no way limit the invention to the embodiments described herein and that other embodiments and uses will no doubt suggest themselves to those skilled in the art. All publications, patents, and patent applications cited herein are hereby incorporated by reference, as are the references cited therein. It is also to be understood that throughout this disclosure where the singular is used, the plural may be inferred and vice versa and use of either is not to be considered limiting.

### EXAMPLE 1

[0161] Cell Lines

[0162] MDA-mb-231 (HLA-A2, A24), a mammary gland ductal carcinoma cell line established from a pleural effusion, was obtained from ATCC (Manassas, Va.) and cultured according to the ATCC protocol. The cell line SKOV3.A2 is an HLA-A2.1 transfectant of the original ATCC (Manassas, Va.) ovarian adenocarcinoma line SKOV3 (HLA-A3, 68, B18, 35, Cw5, -) and was obtained from the M. D. Anderson Cancer Center, Houston, Tex. A second ovarian cancer cell line OVCAR3 (HLA-A2, 29 B7, 58) was procured from ATCC. Both cell lines were cultured according to methods described in Ramakrishna, V. et al. 2003 International Immunology 15(6):751-763.

### EXAMPLE 2

[0163] Immunoaffinity Purification

[0164] All tumor lines were maintained in RPMI 1640 medium containing 10% heat-inactivated FBS, 2 mM L-glutamine, 10 mM HEPES, penicillin (100 U/ml)-streptomycin (50 μg/ml) solution and 1% sodium pyruvate solution (all from Sigma, St Louis, Mo.). The SKOV3.A2 cell line was continuously maintained in 250 μg/ml G418 (Invitrogen). The cells were harvested by treatment with 0.45% trypsin and 0.32 mM EDTA, washed two times in phosphate-buffered saline solution (pH 7.4), and stored as cell pellets at −80° C. Aliquots of 6-8×10¹⁰ cells were solubilized at 5-10×10⁶ cells/ml in 20 mM Tris, pH 8.0, 150 mM NaCl, 1% CHAPS, 18.5 μg/ml iodoacetamide, 5 μg/ml aprotonin, 10 μg/ml leupeptin, 10 μg/ml pepstatin A, 5 mM EDTA, 0.2% sodium azide, and 17.4 μg/ml phenylmethylsulfonyl fluoride for 1 h. This and all subsequent steps were performed with ice-cold solutions and at 4° C. The lysates were then centrifuged at 100,000×g, the pellets discarded, and the supernatants passed through a 0.22 μm filter. The supernatants were then passed over a series of columns with the first containing Sepharose, and the second containing the HLA-A1-specific monoclonal antibody, GAP-A1, bound to a protein A-Sepharose matrix. The second column was then sequentially washed with 20 column volumes of 20 mM Tris, pH 8.0, 150 mM NaCl, 20 column volumes of 20 mM Tris, pH 8.0, 1.0 M NaCl, and 20 column volumes of 20 mM Tris, pH 8.0. The peptides were eluted from the column with 5 column volumes of 10% acetic acid. The isolated HLA-A1 molecules were then boiled for 5 min to further dissociate any bound peptide from the heavy chains. The peptides were then separated from the co-purifying class I heavy chain and β₂-microglobulin by centrifugation on an Ultrafree-CL membrane with a nominal molecular weight cut-off of 5,000 Daltons (Millipore, Bedford, Mass.).

[0165] OVCAR3 or SKOV3 cells were prepared using the same procedure as just described except that HLA-A2 molecules were prepared using HLA-A2-specific antibodies.

### EXAMPLE 3

[0166] Peptide Fractionation

[0167] The peptide extracts were fractionated by RP-HPLC (Reversed Phase-High Performance Liquid Chromatography) using an Applied Biosystems (ABI) model 140B system. The extracts were concentrated by vacuum centrifugation from about 20 ml down to 250 μl and injected into either a Brownlee (Norwalk, Conn.) C₁₈ Aquapore column (2.1 mm×3 cm; 300 Å; 7 μm) or a Higgins (Mountain View, Calif.) C18 Haisil column (2.1 mm×4 cm; 300 Å; 5 μm). The peptides were eluted by first using a gradient of acetonitrile/0.085% TFA (trifluoroacetic acid) in 0.1% TFA/water, with the concentration of acetonitrile increasing from 0-9% (0-5 minutes), 9-36% (5-55 minutes), and 36-60% (55-62 minutes). A second dimension fractionation of combined fractions 17 and 18 from the first dimension (TFA) fraction was accomplished using the same gradient but with the substitution of HFBA (heptafluorobutyric acid) for TFA. The flow rate was 200 μl/min, and fractions were collected at 1 min (Brownlee column) or 40 second (Higgins column) intervals. A third dimension of RP-HPLC was achieved using an Eldex (Napa, Calif.) MicroPro Pump, a homemade C₁₈ microcapillary column, and an ABI model 785A UV absorbance detector. The column was prepared by packing a 27 cm bed of 10 μm C₁₈ particles in a section of 285 μm o.d./75 μm i.d. fused silica (Polymicro Technologies, Phoenix, Ariz.). Peptides in combined fractions 26 and 27 of the second dimension fraction were loaded onto this column and eluted with a gradient of acetonitrile/0.67% triethylamine acetate/water in 0.1% triethylamine acetate/water, with the concentration of acetonitrile increasing from 0-60% in 40 minutes. The flow rate was about 300 nl/min, and fractions were collected into 25 μl of water every 30 sec. In all RP-HPLC experiments, peptides were detected by monitoring UV absorbance at 214 nm.

### EXAMPLE 4

[0168] Mass Spectrometric Analysis

[0169] The second dimension HPLC fraction was analyzed using an affluent splitter on the microcapillary HPLC column. In this experiment, the column (360 μm o.d.×100 μm i.d. with a 25 cm C₁₈ bed) was butt connected with a zero dead volume tee (Valco, Houston, Tex.) to two pieces of fused silica of different lengths (25 μm and 40 μm i.d.). Peptides were eluted with a 34 min gradient of 0-60% acetonitrile. The 25 μm capillary deposited one-fifth of the HPLC effluent into the wells of a microtiter plate for use in CTL epitope reconstitution assays, whereas the remaining four-fifths of the effluent was directed into the mass spectrometer. Ions were formed by electrospray ionization, and mass spectra were recorded by scanning between mass to charge ratios (m/z) 300 and 1400 every 1.5 seconds. Peptide sequences were determined by CAD (collision-activated dissociation) tandem mass spectrometry as described in the literature (Hunt, D. F. et al., Proc. Natl. Acad. Sci. U.S.A, 83:6233-6237, (1986)).

### EXAMPLE 5

[0170] Homology Searches of Identified Peptide Sequences

[0171] Proteins containing peptides corresponding to the masses identified by MS were analyzed with the search algorithm, SEQUEST. Searches were carried using SwissProt, a curated human protein database http://www.expasy.org/sprot/ to identify MHC-associated peptides and their respective source proteins that have been identified in various types of stem cells (Table 2). Table 3 describes SEQ ID NO: 1-241, which are MHC-associated peptides (active fragments) isolated from MDA-mb-231, Ovcar2 or SKOV3.A2 tumor cells. Table 4 lists SEQ ID NO: 799-1039, the original parent proteins from which MHC-associated peptides (active fragments) were identified in one or more of the three cancer cell lines MDA-mb-231, Ovcar3 or SKOV3.A.2.

TABLE 2
Identification of Tumor Cell Antigens also expressed in human stem cells

| | | | Reference |
|---|---|---|---|
| | | | identification |
| | | Motif | and peptide |
| Source Protein | Stem Cell Type¹/Tumor association | Rank² | sequence |
| Macrophage | hMSC/upregulation by TNF associated | 1 | NF00100873 |
| Migration | with tumor growth | | P14174 |
| Inhibitory | | | FLSELTQQL |
| Factor | | | |
| MCT-1 | Lymphomas, epithelial breast tumors/ | 1 | NF00091791 |
| protein | cell-cycle progression associated | | Q9ULC4 |
| | oncogene; expressed in mammary | | YLNDGLWHM |
| | epithelial tumors | | |
| DEAD/H Asp-Glu- | hESC/RNA processing; hedgehog | 1 | NF00130810 |
| Ala-Asp/His) box | pathway associated; c-myc | | Q96FC9 |
| polypeptide 11 | associated | | QLAQFVHEV |
| Bone morphogenetic | hESC, hMSC/tgf-beta family serine- | 5 | NF00100412 |
| protein receptor | threonine kinase; occurs in epithelium; | | Q13873 |
| type II precursor | associated with ↑ tumor growth | | SLDERPVAV |
| Protocadherin gamma | hESC and progenitors/possible role in | 3 | NF00117260 |
| A6 precursor | cell survival or cell adhesion | | O60330 |
| (PCDH-gamma-A6) | | | FLQTYSHEV |
| Retinoblastoma- | hESC/cell cycle regulation; Shh | Not | NF00122941 |
| associated protein | suppression of Rb may stimulate | predicted | Q9UK61 |
| (RAP 140) | meduloblastoma cell proliferation | | FLFQEPRSI |
| Vimentin | hESC,hMSC/gynecologic tumor marker | Not | NF00074186 |
| | | predicted | P08670 |
| | | | DAINTEFKNTR |
| T-plastin | hEpSC, hMSC/tgf-beta regulated, assoc | 5 | NF00123528 |
| | with actin filament organization; | | P13797 |
| | lymphoma marker | | NLFNKYPAL |
| Notch protein | hHSC, hNSC/self-renewal in hHSC and | NR³ | NF00094242 |
| homolog TAN-1 | lineage-specific differentiation; | | P46531 |
| precursor | role in T cell development, down- | | NGGTCEDGIN |
| | regulation in cervical carcinoma cell | | |
| | line inhibited proliferation in | | |
| | vitro and tumorigenicity in vivo | | |
| Bax inhibitor-1 | hHSC, hNSC/BCL-2 family, role in | NR | NF00134091 |
| | apoptosis, neural SC development; | | P55061 |
| | downregulated in endometrial carcinoma | | AYVHMVTHF |
| | (↑proliferation) | | |
| F box/WD repeat | HESC, hNSC, hHSC/Family with WD motifs; | | NF00075424 |
| protein 8 | roles in cell cycle progression, signal | | Q9P2S5 |
| | transduction, apoptosis, and gene | | TEFGHIPAAI |
| | regulation | | |
| Protem-tyrosine | hHSC, D. melanogaster germinal sc/TNF- | To long | NF00117313 |
| kinase JAK1 | alpha activated; assoc with stem cell | for | P23458 |
| | self-renewal; assoc with B cell tumors; | algorithm | KMIGPTHGOQMTV |
| | JAK/STAT deregulation associated with | | |
| | multiple human tumors | | |
| Dj-1 | Fibroblasts/regulates PTEN tumor | NR | NF01304682 |
| | suppressor; circulating breast tumor | | Q99497 |
| | marker; epithelialization gene | | HEIGFGSKV |
| Keratin | hMSC, hEpSC/breast tumor marker; | NR | NF01616723 |
| 8/cytokeratins | epithelial tumor-associated | | P05787 |
| 8 type II cyto- | | | GKLVSESSDVLPK |
| skeletal 8 | | | |
| Lactadherin | hHSC/mammary-epithelium protein, | NR | NF00128029 |
| precursor (Milk | breast tumor marker; associated with | | Q80431 |
| fat globule-EGF | metastasis in disseminated cancer | | HEYLKAFKV |
| factor 8) (Breast | cells in haemopoietic compartments | | |
| epithelial antigen | such as bone marrow or in lymph | | |
| BA46) | nodes | | |

¹hESC, human embryonic stem cells; hHSC human hematopoietic stem cells; hMSC, human mesenchymal stem cells; hNSC, human neural stem cells; hEpSC human epithelial stem cells
²MHC binding affinity calculation for the specific protein, ranked according to the algorithm of Parker et al. J. Biological Physics 28 (2) 183-194 (2004).
³Not Predicted (more than 10 amino acids in length)
⁴Not Ranked (peptide not present in the top 20 rank)

### EXAMPLE 6

[0172] Peptide Synthesis

[0173] Peptides were synthesized using a Gilson (Madison, Wis.) AMS 422 multiple peptide synthesizer. Quantities of 10 μMol were synthesized using conventional FMOC amino acids, resins, and chemical techniques. Peptides were purified by RP-HPLC using a 4.6 mm×100 mm POROS (Perseptive Biosystems, Cambridge, Mass.) column and a 10 min, 0-60% acetonitrile in 0.1% TFA gradient.

### EXAMPLE 7

[0174] Generation of Monocyte-derived Dendritic Cells and Peptide Loading

[0175] PBMC were purified from HLA-A2⁺ normal donor blood using lymphocyte separation media (Cappel ICN Biomedical, Aurora, Ohio). PBMC (5.3×10⁶) were added to individual wells of a 24-well cluster plate (Costar, Coming, N.Y.) in 1.0 ml of serum-free AIM-V medium (Life Technologies) and allowed to adhere for 60 min at 37° C. Non-adherent cells were removed and saved as a source of effector T cells. Adherent PBMC (˜8.3×10⁵/well) were then pulsed with 50 mg/ml synthetic peptides in serum-free AIM-V medium containing 1.5 mg/ml β₂-microglobulin (Calbiochem-Novabiochem, San Diego, Calif.) and incubated for 2 h at 37° C. Unbound peptides were aspirated and the wells washed with media.

[0176] Monocyte-derived DC were generated as follows. PBMC (5.3×10⁷) were allowed to adhere in T-75 flasks (Corning) in 10 ml of serum-free AIM-V medium for 60 min at 37° C. Non-adherent cells were collected as a source of effector T cells and pooled with the previous collection above. Adherent monocytes in flasks were then exposed to recombinant human granulocyte macrophage colony stimulating factor (GM-CSF, 25 ng/ml; Peprotech) and recombinant human IL-4 (100 ng/ml; Peprotech) in 10 ml of AIM-V medium containing 10% heat-inactivated FBS. DC obtained by this method [immature DC (iDC)] are characterized by expression of low levels of CD83, CD80, CD86, and HLA class I and class II molecules (data not shown).

[0177] Mature DC (mDC) were obtained by exposing day 5 DC cultures to recombinant soluble CD40 ligand (sCD40L; Peprotech) at 1.5 mg/ml for 24 h in the presence of 25 ng/ml GM-CSF and are characterized by expression of high levels of CD80, CD86, and HLA class I and class II molecules. mDC were harvested, washed, pulsed with 5 mg/ml peptide in serum-free AIM-V medium and irradiated (5000 rad) prior to use as stimulators.

### EXAMPLE 8

[0178] Generation of Peptide-specific CTL

[0179] The protocol used here is a modification of the method described by Plebanski et al. (Eur. J. Immunol. 25:1783, (1995)). CTL to peptide were generated by 3±4 cycles of stimulation with peptide-loaded APC. For the first round of stimulation (day 0), T cells or non-adherent PBMC from above (2.3×10⁶/ml or 4.3×10⁶ per well) were added in bulk (CD4⁺, CD8⁺, NK, etc.) to adherent PBMC-loaded peptides in serum-free medium (50 mg/ml), β₂-microglobulin (1.5 mg/ml) (Calbiochem-Novabiochem), recombinant human IL-7 (5 ng/ml) (Peprotech) and keyhole limpet hemocyanin (5 mg/ml) (Sigma, St Louis, Mo.). Cultures were re-stimulated with iDC every 7 days, pulsed with varying amounts of peptide (second round 25 mg/ml, third round 10 mg/ml) and irradiated (5000 rad) on day 8. At each re-stimulation, the T cells were transferred to new plates by first aspirating 70% of spent media in wells and then transferring the pooled contents to a new plate. Fresh IL-7 was added at each re-stimulation. The responder:stimulator (T cell:DC) ratio was set at 20 for each stimulation. Recombinant human IL-2 (10 U/ml) was added on day 5 after each re-stimulation.

[0180] Prior to ⁵¹Cr-release assay, the T cells were harvested and CD8⁺ T cells were purified by positive selection using CD8⁺ microbeads immunomagnetic cell separation with MACS kit (Miltenyi Biotec, Auburn, Calif.). If a fourth round of stimulation was necessary following CTL analysis, the CTL were pulsed as before, except with 5±10 mg/ml of peptide.

### EXAMPLE 9

[0181] Generation of Allospecific CTL

[0182] HLA-A2-allospecific CTL were obtained in a mixed lymphocyte reaction by repeated stimulation of HLA-A3⁺ PBMC (responders) with irradiated HLA-A2⁺ stimulator PBMC at a ratio of 10:1 in the presence of 10 U/ml IL-2. Stimulation was repeated weekly with PBMC from different HLA-A2⁺ donors so as to minimize alloresponse to non-HLA-A2 antigens. T cells were assessed for lysis on several HLA-A2⁺ targets including tumor cells, EBV-B cells and HLA-A3⁺ targets every week after the third round of stimulation.

### EXAMPLE 10

[0183] Cytotoxic T Lymphocyte Expansion

[0184] Expansion of large numbers of peptide-specific or HLA-A2-allospecific CTL was achieved by culturing 5.3×10⁴±1.3×10⁵ T cells around day 6 or 7 post peptide- or allostimulation in the presence of 2.5-3.0×10⁷ irradiated (5000 rad) allogeneic normal donor PBMC coated with anti-CD3 antibody at 10 ng/ml (BD PharMingen, San Diego, Calif.) and 25 U/ml of recombinant human IL-2 (Peprotech) in a final volume of 30 ml RPMI medium. Media changes with IL-2 addition (50 U/ml) were effected on days 5 and 8. Cells were harvested for cytotoxicity assays on days 10±12 and re-stimulated or frozen for later use.

### EXAMPLE 11

[0185] Interferon-γ Enzyme-linked Immunospot (ELISPOT) Assay

[0186] MultiScreen-IP opaque 96-well plates (High Protein Binding Immobilon-P membrane, Millipore, Bedford, Mass.) were coated overnight at room temperature with 50 μl/well of 20 μg/ml mouse anti-human IFN-γ mAb (BioSource, Camarillo, Calif.) in DPBS (Invitrogen). After overnight incubation, the plates were washed three times with 200 μl DPBS/well and blocked with 200 μl/well of RPMI 1640, 10% human AB serum (Mediatech, Herndon, Va.), 25 mM Hepes, 2 mM L-glutamine, 100 U/ml penicillin and 100 μg/ml streptomycin (Invitrogen) for 2 h at 37° C., 5% CO₂. Harvested effector antigen specific CTL were added to the plates in triplicates at 1×10⁵ cells/well with either culture medium alone or tumor target cells at various effector:target ratios and cultured for 48 h at 37° C., 5% CO₂. The plates were washed manually 6 times with 200 μl/well of DPBS/0.05% Tween. 50 μl/well of 2 μg/ml mouse anti-human IFN-γ-biotinylated mAb (BD Pharmingen, San Diego, Calif.) in DPBS/1% BSA/0.05% Tween was added and the plates were incubated for 2 h at room temperature. Plates were manually washed 4 times with DPBS and 50 μl/well of streptavidin HRP (BD Pharmingen) diluted 1:2000 in DPBS/1% BSA was added for 1 h at room temperature. The plates were washed a final 4 times with DPBS. Spots were visualized by adding 100 μl/well of TrueBlue™ Peroxidase Substrate (KPL, Gaithersburg, Md.) for 2 min. Plates were scanned and counted using the ImmunoSpot analyzer (Cellular Technology, Ltd., Cleveland, Ohio) to determine the number of spots/well. The precursor frequency of tumor-specific T cells was determined by subtracting the background spots in tumor alone and PBMC alone from the number of spots seen in response to tumor cells.

### EXAMPLE 12

[0187] Preparation and Administration of an Immunotherapeutic Peptide Formulation to Cancer Patients

[0188] For each patient cohort, the study drug consists of one or more CTL-reactive tumor rejection peptides identified in Example 11, with 100 mcg of each peptide mixed with 1 ml Montanide ISA 51 and 100 mcg GM-CSF. Additionally, a second cohort receives a study drug consisting of one or more peptides identified in Example 11 with 1 mg of each of the peptide mixed with 1 ml Montanide ISA 51 and 100 mcg GM-CSF. On the day of immunization, each vial of peptides is thawed, mixed with 100 microliters of saline and drawn up into a 3 ml syringe and emulsified in Montanide ISA 51 (1 ML) and mixed with GM-CSF for a total volume of 2 ml. The mixture is injected intradennally for the first 200 microliters and then the remainder is injected subcutaneously.

TABLE 3

Description of Active Fragments, Parent Sequence
Identification and Parent SwissProt Identification
Number for peptides 1-125.

| | Peptide | | SwissProt |
|---|---|---|---|
| SEQ ID NO: | Fragment | Parent Protein Identification | ID No. |
| SEQ ID NO:1 | NMEEQPINI | Transcriptional repressor CTCF | P49711 |
| SEQ ID NO:2 | FLASSSAEEQ | Timeless homolog | Q9UNS1 |
| SEQ ID NO:3 | VKLPDGYEF | Galectin-1 | P09382 |
| SEQ ID NO:4 | SGVDFLIFQV | Bone specific GMF608 | AAQ16156.1 |
| SEQ ID NO:5 | VGAAFAMPLPP | Amelogenin | Q99218 |
| SEQ ID NO:6 | FIVDPVSNL | Desmoplakin | P15924 |
| SEQ ID NO:7 | CAWNPVSDL | Nuclear receptor co-repressor/ | Q9BZK7 |
| | | HDAC3 complex subunit TBLR1 | |
| SEQ ID NO:8 | TCLAINSCALG | MEGF6 | O75095 |
| SEQ ID NO:9 | IADFGLAKLL | Tyrosine-protein kinase JAK3 | P52333 |
| SEQ ID NO:10 | HSDEGGVASL | Trophinin-associated protein | Q12815 |
| | | (Tastin) | |
| SEQ ID NO:11 | NMTVLSPYL | Adenomatous polyposis coli | P25054 |
| | | protein | |
| SEQ ID NO:12 | YVKDIYAYL | G2/mitotic-specific cyclin B1 | P14635 |
| SEQ ID NO:13 | TLAKYLMEL | G2/mitotic-specific cyclin B1 | P14635 |
| SEQ ID NO:14 | VQPVTPEPCV | Semaphorin 5B precursor | Q9P283 |
| SEQ ID NO:15 | VIIDQLPDL | LDL receptor-related protein 6 | O75581 |
| SEQ ID NO:16 | SLFPGKLEVV | Flightless-I protein homolog | Q13045 |
| SEQ ID NO:17 | TLPEAIHFL | Flightless-I protein homolog | Q13045 |
| SEQ ID NO:18 | YLPELLQTV | Ectoderm-neural cortex-1 | O14682 |
| | | protein (ENC-1) | |
| SEQ ID NO:19 | TNVTSLLKTV | Talin 1 | Q9Y490 |
| SEQ ID NO:20 | WAKATLLQGG | Semaphorin 6B precursor | Q9H3T3 |
| | | (Semaphorin Z) | |
| SEQ ID NO:21 | SLQEEIAFL | Vimentin | P08670 |
| SEQ ID NO:22 | NLAEDIMRL | Vimentin | P08670 |
| SEQ ID NO:23 | ILLAELEQL | Vimentin | P08670 |
| SEQ ID NO:24 | MVLKAKFQV | Galectin-8 | CAA62904.1 |
| SEQ ID NO:25 | LALAALPAAL | Wnt-1 proto-oncogene protein | P04628 |
| | | precursor | |
| SEQ ID NO:26 | YGLPVVVKL | Beta-catenin | P35222 |
| SEQ ID NO:27 | GLLGTLVQL | Beta-catenin | P35222 |
| SEQ ID NO:28 | ENAGTEEIKN | Programmed cell death 4 | NP_663314.1 |
| | | isoform 2 | |
| SEQ ID NO:29 | EALLGVPLI | Lunatic fringe | AAC51360.1 |
| SEQ ID NO:30 | RLPDIFEAQI | Keratin, type II cyto- | P08729 |
| | | skeletal 7 | |
| SEQ ID NO:31 | YYISHSPQA | Ephrin A1 isoform b | NP_872626.1 |
| | | precursor | |
| SEQ ID NO:32 | VLIPKLPQL | ORMDL3 | Q8N138 |
| SEQ ID NO:33 | KPETFEHLF | Leptin receptor precursor | P48357 |
| | | (LEP-R) | |
| SEQ ID NO:34 | LDLIMKRME | Ras-related protein Rab-27A | P51159 |
| SEQ ID NO:35 | EALNKKAIQI | FKBP-rapamycin associated | P42345 |
| | | protein (FRAP) | |
| SEQ ID NO:36 | ISNDKFEYL | Transcription factor Dp-1 | Q14186 |
| SEQ ID NO:37 | RHPGPGSFGR | Epbrin-B3 precursor | Q15768 |
| SEQ ID NO:38 | TVTDFLAIDA | Semaphorin 6A precursor | Q9H2E6 |
| SEQ ID NO:39 | VEMANLLNL | Homeobox protein Hox-B3 | P14651 |
| SEQ ID NO:40 | RLYYIGGEVF | SMAD 2 | Q15796 |
| SEQ ID NO:41 | RLPPPFPGL | Sorting nexin 1 | Q13596 |
| SEQ ID NO:42 | IMKVGQDPN | Ephrin-B1 precursor | P98172 |
| SEQ ID NO:43 | ILVTLTQLI | Eyes absent homolog 1 | Q99502 |
| SEQ ID NO:44 | NDVMIRKEA | Mago nashi protein homolog | P50606 |
| SEQ ID NO:45 | KILSTHLL | hCLOCK | O15516 |
| SEQ ID NO:46 | SELQVLLGF | Protein inhibitor of activated | Q9Y6X2 |
| | | STAT protein 3 | |
| SEQ ID NO:47 | TLFTVLTYL | Frizzled 7 precursor | O75084 |
| SEQ ID NO:48 | PMCETLTYI | Zinc finger protein 294 | O94822 |
| SEQ ID NO:49 | AVIVLVALL | Leukosialin precursor CD34 | P16150 |
| SEQ ID NO:50 | VMLDVPIRL | Ras GTPase-activating protein | Q9UJF2 |
| | | nGAP | |
| SEQ ID NO:51 | ILLKDILSV | Serine-protein kinase ATM | Q13315 |
| SEQ ID NO:52 | VTGLCTLFTL | Smoothened homolog precursor | Q99835 |
| SEQ ID NO:53 | SILSLVTKI | NF45 protein | Q12905 |
| SEQ ID NO:54 | KLLLRLPSL | COUP transcription factor 2 | P24468 |
| SEQ ID NO:55 | SVIEQLFFV | COUP transcription factor 2 | P24468 |
| SEQ ID NO:56 | ALQTMEPALP | Disheveled associated activator | Q9Y4D1 |
| | | of morphogenesis 1 | |
| SEQ ID NO:57 | DAIIIGEGAQM | Wnt-7b protein precursor | P56706 |
| SEQ ID NO:58 | ATSQGLLIR | Semaphorin 3C precursor | Q99985 |
| SEQ ID NO:59 | TVLSNNLSPF | E1A-associated protein p300 | Q09472 |
| SEQ ID NO:60 | AVIENPEML | HIRA protein | P54198 |
| SEQ ID NO:61 | KIDNSLDKL | Activin | Q04771 |
| SEQ ID NO:62 | GGKMLLIAIL | Angiopoietin 1 | Q02763 |
| SEQ ID NO:63 | MLPSILNQL | Transcription factor BTF3 | P20290 |
| SEQ ID NO:64 | APQNLIFNI | Ephrin type-A receptor 7 | Q15375 |
| SEQ ID NO:65 | ISHEQLPEL | Bone morphogenetic protein 10 | O95393 |
| SEQ ID NO:66 | ENNYTALQN | Fibroblast growth factor-8 | P55075 |
| SEQ ID NO:67 | VILHLTVLL | Transcription factor ELYS | Q8WYPS |
| SEQ ID NO:68 | TIYPKYEVN | Bone morphogenetic protein 1 | P13497 |
| SEQ ID NO:69 | FVIIFLGVVL | Receptor-type protein-tyrosine | P28827 |
| | | phosphatase mu | |
| SEQ ID NO:70 | VTSSIITVPV | Ankyrin 3 (ANK-3) (Ankyrin G) | Q12955 |
| SEQ ID NO:71 | AEDLLRFTV | Sorting nexin 15 | Q9NRS6 |
| SEQ ID NO:72 | LLGNSPVLLL | ABC transporter ABCA6 | Q8N139 |
| SEQ ID NO:73 | NLMEQPIKV | Junction plakoglobin | P14923 |
| SEQ ID NO:74 | ALLRRPTV | G2/mitotic-specific cyclin B2 | O95067 |
| SEQ ID NO:75 | NRIVLPFSF | Jagged 1 | P78504 |
| SEQ ID NO:76 | FSLSPFPSL | Homeobox protein Cux-2 | O14529 |
| SEQ ID NO:77 | ALLREGESL | L-plastin | P13796 |
| SEQ ID NO:78 | ILPVPAFNV | Gamma enolase | P09104 |
| SEQ ID NO:79 | VMIPTLPSI | FRAP-related protein | Q13535 |
| SEQ ID NO:80 | SLEPLLQQL | WNT1 inducible signaling | O95389 |
| | | pathway protein 3 | |
| SEQ ID NO:81 | TXDIDLKAL | discs large homolog 5 | NP_004738.2 |
| SEQ ID NO:82 | MEVRLIFL | Presenilin-like protein 2 | Q8TCT8 |
| SEQ ID NO:83 | YLLPAIVHI | Probable RNA-dependent | P17844 |
| | | helicase p68 | |
| SEQ ID NO:84 | ELNLETPEI | Neuroblast differentiation | Q09666 |
| | | associated protein AHNAK | |
| SEQ ID NO:85 | NIGLAILFV | Junctophilin 1 | Q9HDC5 |
| SEQ ID NO:86 | KGERGLVPTD | Sorting nexin 9 | Q9Y5X1 |
| SEQ ID NO:87 | TLPATVPLLL | Telomerase-associated protein | Q99973 |
| | | TP-1 | |
| SEQ ID NO:88 | ALRKQLVPLL | Desert hedgehog protein | O43323 |
| | | precursor | |
| SEQ ID NO:89 | QAPLLPLL | ephrin-A2 | JE0322 |
| SEQ ID NO:90 | MIEANIRR | Clock protein | Q8TAB0 |
| SEQ ID NO:91 | SLPEVLPIL | Integrin alpha-6 precursor | P23229 |
| | | (VLA-6) | |
| SEQ ID NO:92 | MDKEVDDIL | Serine phosphatase FCP1a | Q9Y6F5 |
| SEQ ID NO:93 | VMAGTIGTIL | glycophorin alpha | 1311302A |
| SEQ ID NO:94 | LARGILLPLI | Sorting nexin 13 | Q9Y5W8 |
| SEQ ID NO:95 | NILPPLLQL | Importin alpha-1 subunit | P52294 |
| SEQ ID NO:96 | EDLEDGEDL | Sorting nexin 2 | O60749 |
| SEQ ID NO:97 | FPLEGPYAAA | Neurogenic locus notch homolog | Q9UM47 |
| | | protein 3 | |
| SEQ ID NO:98 | YLKILNEQ | DNA mismatch repair protein | P20585 |
| | | Msh3 | |
| SEQ ID NO:99 | YIILELME | Proto-oncogene tyrosine-protein | P08922 |
| | | kinase ROS precursor | |
| SEQ ID NO:100 | FFTQTKYTFV | Vascular endothelial-cadherin | P33151 |
| | | precursor (VE-cadherin) | |
| SEQ ID NO:101 | QLDKDSPVSA | Laminin alpha-1 chain precursor | P25391 |
| SEQ ID NO:102 | GKEDTQTLQSL | Nestin | P48681 |
| SEQ ID NO:103 | TKENQEPLR | Nestin | P48681 |
| SEQ ID NO:104 | DKDEVDLLI | NAD-dependent deacetylase | Q96EB6 |
| | | sirtuin 1 | |
| SEQ ID NO:105 | MIRLGLFTV | Frizzled 8 | Q9H461 |
| SEQ ID NO:106 | QILPTLVRL | Importin alpha-2 subunit | P52292 |
| SEQ ID NO:107 | EANSSYFHL | Frizzled 10 | Q9ULW2 |
| SEQ ID NO:108 | QAVRQDPLL | Sorting nexin 17 | Q15036 |
| SEQ ID NO:109 | FLSELTQQL | Macrophage Migration Inhibitory | P14174 |
| | | Factor | |
| SEQ ID NO:110 | YLNDGLWHM | MCT-1 protein | Q9ULC4 |
| SEQ ID NO:111 | QLAQFVHEV | DEAD/H Asp-Glu-Ala-Asp/His | Q96FC9 |
| | | box polypeptide 11 | |
| SEQ ID NO:112 | SLDERPVAV | Bone morphogenetic protein | Q13873 |
| | | receptor type II precursor | |
| SEQ ID NO:113 | FLQTYSHEV | Protocadherin gamma A6 | O60330 |
| | | precursor | |
| SEQ ID NO:114 | FLFQEPRSI | Retinoblastoma-associated | Q9UK61 |
| | | protein (RAP140) | |
| SEQ ID NO:115 | NLFNKYPAL | T-plastin | P13797 |
| SEQ ID NO:116 | DGLSQEQLE | B cell Lymphoma Protein 9 | O00512 |
| | | (legless homolog) | |
| SEQ ID NO:117 | NGGTCEDGIN | Notch protein homolog TAN-1 | P46531 |
| | | precursor | |
| SEQ ID NO:118 | AYVHMVTHF | Bax inhibitor-1 | P55061 |
| SEQ ID NO:119 | TEFGHPAAI | F box/WD repeat protein 8 | Q9P2S5 |
| SEQ ID NO:120 | KMIGPTHGQMTV | Protein-tyrosine kinase JAK1 | P23458 |
| SEQ ID NO:121 | HEIGFGSKV | Dj-1 | Q99497 |
| SEQ ID NO:122 | GKLVSESSDVLPK | Keratin 8/cytokeratins 8 type | P05787 |
| | | II cytoskeletal 8 | |
| SEQ ID NO:123 | HEYLKAFKV | Lactadherin precursor (Milk fat | Q08431 |
| | | globule-EGF factor 8) (Breast | |
| | | epithelial antigen BA46) | |
| SEQ ID NO:124 | HLDEAIHVL | Transcription factor E2-alpha | P15923 |
| SEQ ID NO:125 | SLDTQPKKV | Transcription factor E2-alpha | P15923 |

[0189] TABLE 4

SEQ ID NO, Parent Protein Identification and SwissProt
Identification Number for Full-length Immunogen
Sequences 126-242.

| | | SwissProt |
|---|---|---|
| | | Identification |
| SEQ ID NO: | Parent Protein Identification | No. |
| SEQ ID NO:126 | Transcriptional repressor CTCF | P49711 |
| SEQ ID NO:127 | Timeless homolog | Q9UNS1 |
| SEQ ID NO:128 | Galectin-1 | P09382 |
| SEQ ID NO:129 | Bone specific CMF608 | AAQ16156.1 |
| SEQ ID NO:130 | Amelogenin | Q99218 |
| SEQ ID NO:131 | Desmoplakin | P15924 |
| SEQ ID NO:132 | Nuclear receptor co-repressor/ | Q9BZK7 |
| | HDAC3 complex subunit TBLR1 | |
| SEQ ID NO:133 | MEGF6 | O75095 |
| SEQ ID NO:134 | Tyrosine-protein kinase JAK3 | P52333 |
| SEQ ID NO:135 | Trophinin-associated protein (Tastin) | Q12815 |
| SEQ ID NO:136 | Adenomatous polyposis coliprotein | P25054 |
| SEQ ID NO:137 | G2/mitotic-specific cyclin B1 | P14635 |
| SEQ ID NO:138 | Semaphorin 5B precursor | Q9P283 |
| SEQ ID NO:139 | LDL receptor-related protein 6 | O75581 |
| SEQ ID NO:140 | Flightless-I protein homolog | Q13045 |
| SEQ ID NO:141 | Ectoderm-neural cortex-1 protein | O14682 |
| | (ENC-1) | |
| SEQ ID NO:142 | Talin 1 | Q9Y490 |
| SEQ ID NO:143 | Semaphorin 6B precursor (Semaphorin Z) | Q9H3T3 |
| SEQ ID NO:144 | Vimentin | P08670 |
| SEQ ID NO:145 | Galectin-8 | CAA62904.1 |
| SEQ ID NO:146 | Wnt-1 proto-oncogene protein precursor | P04628 |
| SEQ ID NO:147 | Beta-catenin | P35222 |
| SEQ ID NO:148 | programmed cell death 4 isoform 2 | NP_663314.1 |
| SEQ ID NO:149 | Lunatic fringe | AAC51360.1 |
| SEQ ID NO:150 | Keratin, type II cytoskeletal 7 | P08729 |
| SEQ ID NO:151 | Ephrin A1 isoformb precursor | NP_872626.1 |
| SEQ ID NO:152 | ORMDL3 | Q8N138 |
| SEQ ID NO:153 | Leptin receptor precursor (LEP-R) | P48357 |
| SEQ ID NO:154 | Ras-related protein Rab-27A | P51159 |
| SEQ ID NO:155 | FKBP-rapamycin associated protein | P42345 |
| | (FRAP) | |
| SEQ ID NO:156 | Transcription factor Dp-1 | Q14186 |
| SEQ ID NO:157 | Ephrin-B3 precursor | Q15768 |
| SEQ ID NO:158 | Semaphorin 6A precursor | Q9H2E6 |
| SEQ ID NO:159 | Homeobox protein Hox-B3 | P14651 |
| SEQ ID NO:160 | SMAD 2 | Q15796 |
| SEQ ID NO:161 | Sorting nexin 1 | Q13596 |
| SEQ ID NO:162 | Ephrin-B1 precursor | P98172 |
| SEQ ID NO:163 | Eyes absent homolog 1 | Q99502 |
| SEQ ID NO:164 | Mago nashi protein homolog | P50606 |
| SEQ ID NO:165 | hCLOCK | O15516 |
| SEQ ID NO:166 | Protein inhibitor of activated STAT | Q9Y6X2 |
| | protein 3 | |
| SEQ ID NO:167 | Frizzled 7 precursor | O75084 |
| SEQ ID NO:168 | Zinc finger protein 294 | O94822 |
| SEQ ID NO:169 | Leukosialin precursor CD34 | P16150 |
| SEQ ID NO:170 | Ras GTPase-activating protein nGAP | Q9UJF2 |
| SEQ ID NO:171 | Serine-protein kinase ATM | Q13315 |
| SEQ ID NO:172 | Smoothened homolog precursor | Q99835 |
| SEQ ID NO:173 | NF45 protein | Q12905 |
| SEQ ID NO:174 | COUP transcription factor 2 | P24468 |
| SEQ ID NO:175 | Disheveled associated activator of | Q9Y4D1 |
| | morphogenesis 1 | |
| SEQ ID NO:176 | Wnt-7b protein precursor | P56706 |
| SEQ ID NO:177 | Semaphorin 3C precursor | Q99985 |
| SEQ ID NO:178 | E1A-associated protein p300 | Q09472 |
| SEQ ID NO:179 | HIRA protein | P54198 |
| SEQ ID NO:180 | Activin | Q04771 |
| SEQ ID NO:181 | Angiopoietin 1 | Q02763 |
| SEQ ID NO:182 | Transcription factor BTF3 | P20290 |
| SEQ ID NO:183 | Ephrin type-A receptor 7 | Q15375 |
| SEQ ID NO:184 | Bone morphogenetic protein 10 | O95393 |
| SEQ ID NO:185 | Fibroblast growth factor-8 | P55075 |
| SEQ ID NO:186 | Transcription factor ELYS | Q8WYP5 |
| SEQ ID NO:187 | Bone morphogenetic protein 1 | P13497 |
| SEQ ID NO:188 | Receptor-type protein-tyrosine | P28827 |
| | phosphatase mu | |
| SEQ ID NO:189 | Ankyrin 3 (ANK-3) (Ankyrin G) | Q12955 |
| SEQ ID NO:190 | Sorting nexin 15 | Q9NRS6 |
| SEQ ID NO:191 | ABC transporter ABCA6 | Q8N139 |
| SEQ ID NO:192 | Junction plakoglobin | P14923 |
| SEQ ID NO:193 | G2/mitotic-specific cyclin B2 | O95067 |
| SEQ ID NO:194 | Jagged 1 | P78504 |
| SEQ ID NO:195 | Homeobox protein Cux-2 | O14529 |
| SEQ ID NO:196 | L-plastin | P13796 |
| SEQ ID NO:197 | Gamma enolase | P09104 |
| SEQ ID NO:198 | FRAP-related protein | Q13535 |
| SEQ ID NO:199 | WNT1 inducible signaling pathway | O95389 |
| | protein 3 | |
| SEQ ID NO:200 | discs large homolog 5 | NP_004738.2 |
| SEQ ID NO:201 | Presenilin-like protein 2 | Q8TCT8 |
| SEQ ID NO:202 | Probable RNA-dependent helicase p68 | P17844 |
| SEQ ID NO:203 | Neuroblast differentiation associated | Q09666 |
| | protein AHNAK | |
| SEQ ID NO:204 | Junctophilin 1 | Q9HDC5 |
| SEQ ID NO:205 | Sorting nexin 9 | Q9Y5X1 |
| SEQ ID NO:206 | Telomerase-associated protein TP-1 | Q99973 |
| SEQ ID NO:207 | Desert hedgehog protein precursor | O43323 |
| SEQ ID NO:208 | Ephrin-A2 | JE0322 |
| SEQ ID NO:209 | Clock protein | Q8TAB0 |
| SEQ ID NO:210 | Integrin alpha-6 precursor (VLA-6) | P23229 |
| SEQ ID NO:211 | Serine phosphatase FCP1a | Q9Y6F5 |
| SEQ ID NO:212 | Glycophorin alpha | 1311302A |
| SEQ ID NO:213 | Sorting nexin 13 | Q9Y5W8 |
| SEQ ID NO:214 | Importin alpha-1 subunit | P52294 |
| SEQ ID NO:215 | Sorting nexin 2 | O60749 |
| SEQ ID NO:216 | Neurogenic locus notch homolog | Q9UM47 |
| | protein 3 | |
| SEQ ID NO:217 | DNA mismatch repair protein Msh3 | P20585 |
| SEQ ID NO:218 | Proto-oncogene tyrosine-protein kinase | P08922 |
| | ROS precursor | |
| SEQ ID NO:219 | Vascular endothelial-cadherin | P33151 |
| | precursor (VE-cadherin) | |
| SEQ ID NO:220 | Laminin alpha-1 chain precursor | P25391 |
| SEQ ID NO:221 | Nestin | P48681 |
| SEQ ID NO:222 | NAD-dependent deacetylase sirtuin 1 | Q96EB6 |
| SEQ ID NO:223 | Frizzled 8 | Q9H461 |
| SEQ ID NO:224 | Importin alpha-2 subunit | P52292 |
| SEQ ID NO:225 | Frizzled 10 | Q9ULW2 |
| SEQ ID NO:226 | Sorting nexin 17 | Q15036 |
| SEQ ID NO:227 | Macrophage Migration Inhibitory Factor | P14174 |
| SEQ ID NO:228 | MCT-1 protein | Q9ULC4 |
| SEQ ID NO:229 | DEAD/H Asp-Glu-Ala-Asp/His box 11 | Q96FC9 |
| SEQ ID NO:230 | Bone morphogenetic protein receptor | Q13873 |
| | type H precursor | |
| SEQ ID NO:231 | Protocadherin gamma A6 precursor | O60330 |
| | (PCDH-gamma-A6) | |
| SEQ ID NO:232 | Retinoblastoma-associated protein | Q9UK61 |
| | (RAP 140) | |
| SEQ ID NO:233 | T-plastin | P13797 |
| SEQ ID NO:234 | B cell Lymphoma Protein 9 (legless | O00512 |
| | homolog) | |
| SEQ ID NO:235 | Notch protein homolog TAN-1 precursor | P46531 |
| SEQ ID NO:236 | Bax inhibitor-1 | P55061 |
| SEQ ID NO:237 | F box/WD repeat protein 8 | Q9P2S5 |
| SEQ ID NO:238 | Protein-tyrosine kinase JAK1 | P23458 |
| SEQ ID NO:239 | Dj-1 | Q99497 |
| SEQ ID NO:240 | Keratin 8/cytokeratins 8 type II | P05787 |
| | cytoskeletal 8 | |
| SEQ ID NO:241 | Lactadherin precursor (Milk fat | Q08431 |
| | globule-EGF factor 8) (Breast | |
| | epithelial antigen BA46) | |
| SEQ ID NO:242 | Transcription factor E2-alpha | P15923 |

The application's sequence listing, which the Patent Office published only in electronic form, follows.

SEQUENCE LISTING (242 sequences)

SEQ ID NO: 1 - protein, 9 aa, Homo sapiens
NMEEQPINI

SEQ ID NO: 2 - protein, 10 aa, Homo sapiens
FLASSSAEEQ

SEQ ID NO: 3 - protein, 9 aa, Homo sapiens
VKLPDGYEF

SEQ ID NO: 4 - protein, 10 aa, Homo sapiens
SGVDFLIFQV

SEQ ID NO: 5 - protein, 11 aa, Homo sapiens
VGAAFAMPLPP

SEQ ID NO: 6 - protein, 9 aa, Homo sapiens
FIVDPVSNL

SEQ ID NO: 7 - protein, 9 aa, Homo sapiens
CAWNPVSDL

SEQ ID NO: 8 - protein, 11 aa, Homo sapiens
TCLAINSCALG

SEQ ID NO: 9 - protein, 10 aa, Homo sapiens
IADFGLAKLL

SEQ ID NO: 10 - protein, 10 aa, Homo sapiens
HSDEGGVASL

SEQ ID NO: 11 - protein, 9 aa, Homo sapiens
NMTVLSPYL

SEQ ID NO: 12 - protein, 9 aa, Homo sapiens
YVKDIYAYL

SEQ ID NO: 13 - protein, 9 aa, Homo sapiens
TLAKYLMEL

SEQ ID NO: 14 - protein, 10 aa, Homo sapiens
VQPVTPEPCV

SEQ ID NO: 15 - protein, 9 aa, Homo sapiens
VIIDQLPDL

SEQ ID NO: 16 - protein, 10 aa, Homo sapiens
SLFPGKLEVV

SEQ ID NO: 17 - protein, 9 aa, Homo sapiens
TLPEAIHFL

SEQ ID NO: 18 - protein, 9 aa, Homo sapiens
YLPELLQTV

SEQ ID NO: 19 - protein, 10 aa, Homo sapiens
TNVTSLLKTV

SEQ ID NO: 20 - protein, 10 aa, Homo sapiens
WAKATLLQGG

SEQ ID NO: 21 - protein, 9 aa, Homo sapiens
SLQEEIAFL

SEQ ID NO: 22 - protein, 9 aa, Homo sapiens
NLAEDIMRL

SEQ ID NO: 23 - protein, 9 aa, Homo sapiens
ILLAELEQL

SEQ ID NO: 24 - protein, 9 aa, Homo sapiens
MVLKAKFQV

SEQ ID NO: 25 - protein, 10 aa, Homo sapiens
LALAALPAAL

SEQ ID NO: 26 - protein, 9 aa, Homo sapiens
YGLPVVVKL

SEQ ID NO: 27 - protein, 9 aa, Homo sapiens
GLLGTLVQL

SEQ ID NO: 28 - protein, 10 aa, Homo sapiens
ENAGTEEIKN

SEQ ID NO: 29 - protein, 9 aa, Homo sapiens
EALLGVPLI

SEQ ID NO: 30 - protein, 10 aa, Homo sapiens
RLPDIFEAQI

SEQ ID NO: 31 - protein, 9 aa, Homo sapiens
YYISHSPQA

SEQ ID NO: 32 - protein, 9 aa, Homo sapiens
VLIPKLPQL

SEQ ID NO: 33 - protein, 9 aa, Homo sapiens
KPETFEHLF

SEQ ID NO: 34 - protein, 9 aa, Homo sapiens
LDLIMKRME

SEQ ID NO: 35 - protein, 10 aa, Homo sapiens
EALNKKAIQI

SEQ ID NO: 36 - protein, 9 aa, Homo sapiens
ISNDKFEYL

SEQ ID NO: 37 - protein, 10 aa, Homo sapiens
RHPGPGSFGR

SEQ ID NO: 38 - protein, 10 aa, Homo sapiens
TVTDFLAIDA

SEQ ID NO: 39 - protein, 9 aa, Homo sapiens
VEMANLLNL

SEQ ID NO: 40 - protein, 10 aa, Homo sapiens
RLYYIGGEVF

SEQ ID NO: 41 - protein, 9 aa, Homo sapiens
RLPPPFPGL

SEQ ID NO: 42 - protein, 9 aa, Homo sapiens
IMKVGQDPN

SEQ ID NO: 43 - protein, 9 aa, Homo sapiens
ILVTTTQLI

SEQ ID NO: 44 - protein, 9 aa, Homo sapiens
NDVMIRKEA

SEQ ID NO: 45 - protein, 8 aa, Homo sapiens
KILSTHLL

SEQ ID NO: 46 - protein, 9 aa, Homo sapiens
SELQVLLGF

SEQ ID NO: 47 - protein, 9 aa, Homo sapiens
TLFTVLTYL

SEQ ID NO: 48 - protein, 9 aa, Homo sapiens
PMCETLTYI

SEQ ID NO: 49 - protein, 9 aa, Homo sapiens
AVIVLVALL

SEQ ID NO: 50 - protein, 9 aa, Homo sapiens
VMLDVPIRL

SEQ ID NO: 51 - protein, 9 aa, Homo sapiens
ILLKDILSV

SEQ ID NO: 52 - protein, 10 aa, Homo sapiens
VTGLCTLFTL

SEQ ID NO: 53 - protein, 9 aa, Homo sapiens
SILSLVTKI

SEQ ID NO: 54 - protein, 9 aa, Homo sapiens
KLLLRLPSL

SEQ ID NO: 55 - protein, 9 aa, Homo sapiens
SVIEQLFFV

SEQ ID NO: 56 - protein, 10 aa, Homo sapiens
ALQTMEPALP

SEQ ID NO: 57 - protein, 12 aa, Homo sapiens
DAIIVIGEGAQM

SEQ ID NO: 58 - protein, 9 aa, Homo sapiens
ATSQGLLIR

SEQ ID NO: 59 - protein, 10 aa, Homo sapiens
TVLSNNLSPF

SEQ ID NO: 60 - protein, 9 aa, Homo sapiens
AVIENPEML

SEQ ID NO: 61 - protein, 9 aa, Homo sapiens
KIDNSLDKL

SEQ ID NO: 62 - protein, 10 aa, Homo sapiens
GGKMLLIAIL

SEQ ID NO: 63 - protein, 9 aa, Homo sapiens
MLPSILNQL

SEQ ID NO: 64 - protein, 9 aa, Homo sapiens
APQNLIFNI

SEQ ID NO: 65 - protein, 9 aa, Homo sapiens
ISHEQLPEL

SEQ ID NO: 66 - protein, 9 aa, Homo sapiens
ENNYTALQN

SEQ ID NO: 67 - protein, 9 aa, Homo sapiens
VILHLTVLL

SEQ ID NO: 68 - protein, 9 aa, Homo sapiens
TIVPKYEVN

SEQ ID NO: 69 - protein, 10 aa, Homo sapiens
FVIIFLGVVL

SEQ ID NO: 70 - protein, 10 aa, Homo sapiens
VTSSIITVPV

SEQ ID NO: 71 - protein, 9 aa, Homo sapiens
AEDLLRFTV

SEQ ID NO: 72 - protein, 10 aa, Homo sapiens
LLGNSPVLLL

SEQ ID NO: 73 - protein, 9 aa, Homo sapiens
NLMEQPIKV

SEQ ID NO: 74 - protein, 8 aa, Homo sapiens
ALLRRPTV

SEQ ID NO: 75 - protein, 9 aa, Hono sapiens
NRIVLPFSF

SEQ ID NO: 76 - protein, 9 aa, Homo sapiens
FSLSPFPSL

SEQ ID NO: 77 - protein, 9 aa, Homo sapiens
ALLREGESL

SEQ ID NO: 78 - protein, 9 aa, Homo sapiens
ILPVPAFNV

SEQ ID NO: 79 - protein, 9 aa, Homo sapiens
VMIPTLPSI

SEQ ID NO: 80 - protein, 9 aa, Homo sapiens
SLEPLLQQL

SEQ ID NO: 81 - protein, 9 aa, Homo sapiens
  misc_feature (2)..(2): Xaa can be any naturally occurring amino acid
TXDIDLKAL

SEQ ID NO: 82 - protein, 8 aa, Homo sapiens
MEVRLIFL

SEQ ID NO: 83 - protein, 9 aa, Homo sapiens
YLLPAIVHI

SEQ ID NO: 84 - protein, 9 aa, Homo sapiens
ELNLETPEI

SEQ ID NO: 85 - protein, 9 aa, Homo sapiens
NIGLAILFV

SEQ ID NO: 86 - protein, 10 aa, Homo sapiens
KGERGLVPTD

SEQ ID NO: 87 - protein, 10 aa, Homo sapiens
TLPATVPLLL

SEQ ID NO: 88 - protein, 9 aa, Homo sapiens
ARKQLVPLL

SEQ ID NO: 89 - protein, 8 aa, Homo sapiens
QAPLLPLL

SEQ ID NO: 90 - protein, 8 aa, Homo sapiens
MIEANIRR

SEQ ID NO: 91 - protein, 9 aa, Homo sapiens
SLPEVLPIL

SEQ ID NO: 92 - protein, 9 aa, Homo sapiens
MDKEVDDIL

SEQ ID NO: 93 - protein, 10 aa, Homo sapiens
VMAGTIGTIL

SEQ ID NO: 94 - protein, 10 aa, Homo sapiens
LARGILLPLI

SEQ ID NO: 95 - protein, 9 aa, Homo sapiens
NILPPLLQL

SEQ ID NO: 96 - protein, 9 aa, Homo sapiens
EDLEDGEDL

SEQ ID NO: 97 - protein, 10 aa, Homo sapiens
FPLEGPYAAA

SEQ ID NO: 98 - protein, 8 aa, Homo sapiens
YLKILNEQ

SEQ ID NO: 99 - protein, 8 aa, Homo sapiens
YIILELME

SEQ ID NO: 100 - protein, 10 aa, Homo sapiens
FFTQTKYTFV

SEQ ID NO: 101 - protein, 10 aa, Homo sapiens
QLDKDSPVSA

SEQ ID NO: 102 - protein, 9 aa, Homo sapiens
TKENQEPLR

SEQ ID NO: 103 - protein, 11 aa, Homo sapiens
GKEDTQTLQSL

SEQ ID NO: 104 - protein, 9 aa, Homo sapiens
DKDEVDLLI

SEQ ID NO: 105 - protein, 9 aa, Homo sapiens
MIRLGLFTV

SEQ ID NO: 106 - protein, 9 aa, Homo sapiens
QILPTLVRL

SEQ ID NO: 107 - protein, 9 aa, Homo sapiens
EANSSYFHL

SEQ ID NO: 108 - protein, 9 aa, Homo sapiens
QAVRQDPLL

SEQ ID NO: 109 - protein, 9 aa, Homo sapiens
FLSELTQQL

SEQ ID NO: 110 - protein, 9 aa, Homo sapiens
YLNDGLWHM

SEQ ID NO: 111 - protein, 9 aa, Homo sapiens
QLAQFVHEV

SEQ ID NO: 112 - protein, 9 aa, Homo sapiens
SLDERPVAV

SEQ ID NO: 113 - protein, 9 aa, Homo sapiens
FLQTYSHEV

SEQ ID NO: 114 - protein, 9 aa, Homo sapiens
FLFQEPRSI

SEQ ID NO: 115 - protein, 9 aa, Homo sapiens
NLFNKYPAL

SEQ ID NO: 116 - protein, 10 aa, Homo sapiens
FLAEHPNVTL

SEQ ID NO: 117 - protein, 10 aa, Homo sapiens
NGGTCEDGIN

SEQ ID NO: 118 - protein, 9 aa, Homo sapiens
AYVHMVTHF

SEQ ID NO: 119 - protein, 9 aa, Homo sapiens
TEFGHPAAI

SEQ ID NO: 120 - protein, 12 aa, Homo sapiens
KMIGPTHGQMTV

SEQ ID NO: 121 - protein, 9 aa, Homo sapiens
HEIGFGSKV

SEQ ID NO: 122 - protein, 13 aa, Homo sapiens
GKLVSESSDVLPK

SEQ ID NO: 123 - protein, 9 aa, Homo sapiens
HEYLKAFKV

SEQ ID NO: 124 - protein, 9 aa, Homo sapiens
HLDEAIHVL

SEQ ID NO: 125 - protein, 9 aa, Homo sapiens
SLDTQPKKV

SEQ ID NO: 126 - protein, 727 aa, Homo sapiens
MEGDAVEAIVEESETFIKGKERKTYQRRREGGQEEDACHLPQNQTDGGEVVQDVNSSVQMVMMEQLDPTLLQMKTEVMEGTVAPEAEAAVDDTQIITLQVVNMEEQPINIGELQLVQVPVPVTVPVATTSVEELQGAYENEVSKEGLAESEPMICHTLPLPEGFQVVKVGANGEVETLEQGELPPQEDPSWQKDPDYQPPAKKTKKTKKSKLRYTEEGKDVDVSVYDFEEEQQEGLLSEVNAEKVVGNMKPPKPTKIKKKGVKKTFQCELCSYTCPRRSNLDRHMKSHTDERPHKCHLCGRAFRTVTLLRNHLNTHTGTRPHKCPDCDMAFVTSGELVRHRRYKHTHEKPFKCSMCDYASVEVSKLKRHIRSHTGERPFQCSLCSYASRDTYKLKRHMRTHSGEKPYECYICHARFTQSGTMKMHILQKHTENVAKFHCPHCDTVIARKSDLGVHLRKQHSYIEQGKKCRYCDAVFHERYALIQHQKSHKNEKRFKCDQCDYACRQERHMIMHKRTHTGEKPYACSHCDKTFRQKQLLDMHFKRYHDPNFVPAAFVCSKCGKTFTRRNTMARHADNCAGPDGVEGENGGETKKSKRGRKRKMRSKKEDSSDSENAEPDLDDNEDEEEPAVEIEPEPEPQPVTPAPPPAKKRRGRPPGRTNQPKQNQPTAIIQVEDQNTGAIENIIVEVKKEPDAEPAEGEEEEAQPAATDAPNGDLTPEMILSMMDR

SEQ ID NO: 127 - protein, 1208 aa, Homo sapiens
MDLHMMNCELLATCSALGYLEGDTYHKEPDCLESVKDLIRYLRHEDETRDVRQQLGAAQILQSDLLPILTQHHQDKPLFDAVIRLMVNLTQPALLCFGNLPKEPSFRHHFLQVLTYLQAYKEAFASEKAFGVLSETLYELLQLGWEERQEEDNLLIERILLLVRNILHVPADLDQEKKIDDDASAHDQLLWAIHLSGLDDLLLFLASSSAEEQWSLHVLEIVSLMFRDQNPEQLAGVGQGRLAQERSADFAELEVLRQREMAEKKTRALQRGNRHSRFGGSYIVQGLKSIGERDLIFHKGLHNLRNYSSDLGKQPKKVPKRRQAARELSIQRRSALNVRLFLRDFCSEFLENCYNRLMGSVKDHLLREKAQQHDETYYMWALAFFMAFNRAASFRPGLVSETLSVRTFHFIEQNLTNYYEMMLTDRKEAASWARRMHLALKAYQELLATVNEMDLSPDEAVRESSRIIKNNIFYVMEYRELFLALFRKFDERCQPRSFLRDLVETTHLFLKMLERFCRSRGNLVVQNKQKKRRKKKKKVLDQAIVSGNVPSSPEEVEAVWPALAEQLQCCAQNSELSMDSVVPFDAASEVPVEEQRAEAMVRIQDCLLAGQAPQALTLLRSAREVWPEGDVFGSQDISPEEEIQLLKQILSAPLPRQQGPEERGAEEEEEEEEEEEEELQVVQVSEKEFNFLDYLKRFACSTVVRAYVLLLRSYQQNSAHTNHCIVKMLHRLAHDLKMEALLFQLSVFCLFNRLLSDPAAGAYKELVTFAKYILGKFFALAAVNQKAFVELLFWKNTAVVREMTEGYGSLDDRSSSRRAPTWSPEEEAHLQELYLANKDVEGQDVVEAILAHLNTVPRTRKQIIHHLVQMGLADSVKDFQRKGTHIVLWTGDQELELQRLFEEFRDSDDVLGHIMKNITAKRSRARIVDKLLALGLVAERRELYKKRQKKLASSILPNGAESLKDFCQEDLEEEENLPEEDSEEEEEGGSEAEQVQGSLVLSNENLGQSLHQEGFSIPLLWLQNCLIRAADDREEDGCSQAVPLVPLTEENEEAMENEQFQQLLRKLGVRPPASGQETFWRIPAKLSPTQLRRAAASLSQPEEEQKLQPELQPKVPGEQGSDEEHCKEHRAQALRALLLAHKKKAGLASPEEEDAVGKEPLKAAPKKRQLLDSDEEQEEDEGRNRAPELGAPGIQKKKRYQIEDDEDD

SEQ ID NO: 128 - protein, 134 aa, Homo sapiens
ACGLVASNLNLKPGECLRVRGEVAPDAKSFVLNLGKDSNNLCLHFNPRFNAHGDANTIVCNSKDGGAWGTEQREAVFPFQPGSVAEVCITFDQANLTVKLPDGYEFKFPNRLNLEAINYMAADGDFKIKCVAFD

SEQ ID NO: 129 - protein, 2623 aa, Homo sapiens
MKVKGRGITCLLVSFAVICLVATPGGKACPRRCACYMPTEVHCTFRYLTSIPDSIPPNVERINLGYNSLVRLMETDFSGLTKLELLMLHSNGIHTIPDKTFSDLQALQVLKMSYNKVRKLQKDTFYGLRSLTRLHMDHNNIEFINPEVFYGLNFLRLVHLEGNQLTKLHPDTFVSLSYLQIFKISFIKFLYLSDNFLTSLPQEMVSYMPDLDSLYLHGNPWTCDCHLKWLSDWIQEKPDVIKCKKDRSPSSAQQCPLCMNPRTSKGKPLAMVSAAAFQCAKPTIDSSLKSKSLTILEDSSSAFISPQGFMAPFGSLTLNMTDQSGNEANMVCSIQKPSRTSPIAFTEENDYIVLNTSFSTFLVCNIDYGHIQPVWQILALYSDSPLILERSHLLSETPQLYYKYKQVAPKPEDIFTNIEADLRADPSWLMQDQISLQLNRTATTFSTLQIQYSSDAQITLPRAEMRPVKHKWTMISRDNNTKLEHTVLVGGTVGLNCPGQGDPTPHVDWLLADGSKVRAPYVSEDGRILIDKSGKLELQMADSFDTGVYHCISSNYDDADILTYRITVVEPLVEAYQENGIHHTVFIGETLDLPCHSTGIPDASISWVIPGNNVLYQSSRDKKVLNNGTLRILQVTPKDQGYYRCVAANPSGVDFLIFQVSVKMKGQRPLEHDGETEGSGLDESNPIAHLKEPPGAQLRTSALMEAEVGKHTSSTSKRHNYRELTLQRRGDSTHRRFRENRRHFPPSARRIDPQHWAALLEKAKKNAMPDKRENTTVSPPPVVTQLPNIPGEEDDSSGMLALHEEFMVPATKALNLPARTVTADSRTISDSPMTNINYGTEFSPVVNSQILPPEEPTDFKLSTAIKTTAMSKNINPTMSSQIQGTTNQHSSTVFPLLLGATEFQDSDQMGRGREHFQSRPPITVRTMIKDVNVKMLSSTTNKLLLESVNTTNSHQTSVREVSEPRHNHFYSHTTQILSTSTFPSDPHTAAHSQFPIPRNSTVNIPLFRRFGRQRKIGGRGRIISPYRTPVLRRHRYSIFRSTTRGSSEKSTTAFSATVLNVTCLSCLPRERLTTATAALSFPSAAPITFPKADIARVPSEESTTLVQNPLLLLENKPSVEKTTPTIKYFRTEISQVTPTGAVMTYAPTSIPMEKTHKVNASYPRVSSTNEAKRDSVITSSLSGAITKPPMTIIAITRFSRRKIPWQQNFVNNHNPKGRLRNQHKVSLQKSTAVMLPKTSPALPRDKVSPFHFTTLSTSVMQIPSNTLTTAHHTTTKTHNPGSLPTKKELPFPPLNPMLPSIISKDSSTKSIISTQTAIPATTPTFPASVITYETQTERSRAQTIQREQEPQKKNRTDPNISPDQSSGFTTPTAMTPPVLTTAETSVKPSVSAFTHSPPENTTGISSTISFHSRTLNLTDVIEELAQASTQTLKSTIASETTLSSKSHQSTTTRKAIIRHSTIPPFLSSSATLMPVPISPPFTQRAVTDNVATPISGLMTNTVVKLHESSRHNAKPQQLVAEVATSPKVHPNAKFTIGTTHFIYSNLLHSTPMPALTTVKSQNSKLTPSPWAENQFWHKPYSEIAEKGKKPEVSMLATTGLSEATTLVSDWDGQKNTKKSDFDKKPVQEATTSKLLPFDSLSRYIFEKPRIVGGKAASFTIPANSDAFLPCEAVGNPLPTIHWTRVPSGLDLSKRKQNSRVQVLPNGTLSIQRVEIQDRGQYLCSASNLFGTDHLHVTLSVVSYPPRILERRTKEITVHSGSTVELKCRAEGRPSPTVTWILANQTVVSESSQGSRQAVVTVDGTLVLHNLSIYDRGFYKCVASNPGGQDSLLVKIQVIAAPPVILEQRRQVIVGTWGESLKLPCTAKGTPQPSVYWVLSDGTEVKPLQFTNSKLFLFSNGTLYIRNLASSDRGTYECIATSSTGSERRVVMLTMEERVTSPRIEAASQKRTEVNFGDKLLLNCSATGEPKPQIMWRLPSKAVVDQQHRVGSWIHVYPNGSLFIGSVTEKDSGVYLCVARNKMGDDLILMHVSLRLKPAKIDHKQYFRKQVLHGKDFQVDCKASGSPVPEISWSLPDGTMINNAMQADDSGHRTRRYTLFNNGTLYFNKVGVAEEGDYTCYAQNTLGKDEMKVHLTVITAAPRIRQSNKTNKRIKAGDTAVLDCEVTGDPKPKIFWLLPSNDMISFSIDRYTFHANGSLTINKVKLLDSGEYVCVARNPSGDDTKMYKLDVVSKPPLINGLYTNRTVIKATAVRHSKKHFDCRAEGTPSPEVMWIMPDNIFLTAPYYGSRITVHKNGTLEIRNVRLSDSADFICVARNEGGESVLVVQLEVLEMLRRPTFRNPFNEKIVAQLGKSTALNCSVDGNPPPEIIWILPNGTRFSNGPQSYQYLIASNGSFIISKTTREDAGKYRCAARNKVGYIEKLVILEIGQKPVILTYAPGTVKGISGESLSLHCVSDGIPKPNIKWTMPSGYVVDRPQINGKYILHDNGTLVIKEATAYDRGNYICKAQNSVGHTLITVPVMIVAYPPRITNRPPRSIVTRTGAAFQLHCVALGVPKPEITWEMPDHSLLSTASKERTHGSEQLHLQGTLVIQNPQTSDSGIYKCTAKNPLGSDYAATYIQVI

SEQ ID NO: 130 - protein, 206 aa, Homo sapiens
MGTWILFACLVGAAFAMPLPPHPGHPGYINFSYENSHSQAINVDRIALVLTPLKWYQSMIRPPYSSYGYEPMGGWLHHQIIPVVSQQHPLTHTLQSHHHIPVVPAQQPRVRQQALMPVPGQQSMTPTQHHQPNLPLPAQQPFQPQPVQPQPHQPMQPQPPVQPMQPLLPQPPLPPMFPLRPLPPILPDLHLEAWPATDKTKQEEVD

SEQ ID NO: 131 - protein, 2871 aa, Homo sapiens
MSCNGGSHPRINTLGRMIRAESGPDLRYEVTSGGGGTSRMYYSRRGVITDQNSDGYCQTGTMSRHQNQNTIQELLQNCSDCLMRAELIVQPELKYGDGIQLTRSRELDECFAQANDQMEILDSLIREMRQMGQPCDAYQKRLLQLQEQMRALYKAISVPRVRRASSKGGGGYTCQSGSGWDEFTKHVTSECLGWMRQQRAEMDMVAWGVDLASVEQHINSHRGIHNSIGDYRWQLDKIKADLREKSAIYQLEEEYENLLKASFERMDHLRQLQNIIQATSREIMWINDCEEEELLYDWSDKNTNIAQKQEAFSIRMSQLEVKEKELNKLKQESDQLVLNQHPASDKIEAYMDTLQTQWSWILQITKCIDVHLKENAAYFQFFEEAQSTEAYLKGLQDSIRKKYPCDKNMPLQHLLEQIKELEKEREKILEYKRQVQNLVNKSKKIVQLKPRNPDYRSNKPIILRALCDYKQDQKIVHKGDECILKDNNERSKWYVTGPGGVDMLVPSVGLIIPPPNPLAVDLSCKIEQYYEAILALWNQLYINMKSLVSWHYCMIDIEKIRAMTIAKLKTMRQEDYMKTIADLELHYQEFIRNSQGSEMFGDDDKRKIQSQFTDAQKHYQTLVIQLPGYPQHQTVTTTEITHHGTCQDVNHNKVIETNRENDKQETWMLMELQKIRRQIEHCEGRMTLKNLPLADQGSSHHITVKINELKSVQNDSQAIAEVLNQLKDMLANFRGSEKYCYLQNEVFGLFQKLENINGVTDGYLNSLCTVRALLQAILQTEDMLKVYEARLTEEETVCLDLDKVEAYRCGLKKIKNDLNLKKSLLATMKTELQKAQQIHSQTSQQYPLYDLDLGKFGEKVTQLTDRWQRIDKQIDFRLWDLEKQIKQLRNYRDNYQAFCKWLYDAKRRQDSLESMKFGDSNTVMRFLNEQKNLHSEISGKRDKSEEVQKIAELCANSIKDYELQLASYTSGLETLLNIPIKRTMIQSPSGVILQEAADVHARYIELLTRSGDYYRFLSEMLKSLEDLKLKNTKIEVLEEELRLARDANSENCNKNKFLDQNLQKYQAECSQFKAKLASLEELKRQAELDGKSAKQNLDKCYGQIKELNEKITRLTYEIEDEKRRRKSVEDRFDQQKNDYDQLQKARQCEKENLGWQKLESEKAIKEKEYEIERLRVLLQEEGTRKREYENELAKVRNHYNEEMSNLRNKYETEINITKTTIKEISMQKEDDSKNLRNQLDRLSRENRDLKDEIVRLNDSILQATEQRRRAEENALQQKACGSEIMQKKQHLEIELKQVMQQRSEDNARHKQSLEEAAKTIQDKNKEIERLKAEFQEEAKRRWEYENELSKVRNNYDEEIISLKNQFETEINITKTTIHQLTMQKEEDTSGYRAQIDNLTRENRSLSEEIKRLKNTLTQTTENLRRVEEDIQQQKATGSEVSQRKQQLEVELRQVTQMRTEESVRYKQSLDDAAKTIQDKNKEIERLKQLIDKETNDRKCLEDENARLQRVQYDLQKANSSATETINKLKVQEQELTRLRIDYERVSQERTVKDQDITRFQNSLKELQLQKQKVEEELNRLKRTASEDSCKRKKLEEELEGMRRSLKEQAIKITNLTQQLEQASIVKKRSEDDLRQQRDVLDGHLREKQRTQEELRRLSSEVEALRRQLLQEQESVKQAHLRNEHFQKAIEDKSRSLNESKIEIERLQSLTENLTKEHLMLEEELRNLRLEYDDLRRGRSEADSDKNATILELRSQLQISNNRTLELQGLINDLQRERENLRQEIEKFQKQALEASNRIQESKNQCTQVVQERESLLVKIKVLEQDKARLQRLEDELNRAKSTLEAETRVKQRLECEKQQIQNDLNQWKTQYSRKEEAIRKIESEREKSEREKNSLRSEIERLQAEIKRIEERCRRKLEDSTRETQSQLETERSRYQREIDKLRQRPYGSHRETQTECEWTVDTSKLVFDGLRKKVTAMQLYECQLIDKTTLDKLLKGKKSVEEVASEIQPFLRGAGSIAGASASPKEKYSLVEAKRKKLISPESTVMLLEAQAATGGIIDPHRNEKLTVDSAIARDLIDFDDRQQIYAAEKAITGFDDPFSGKTVSVSEAIKKNLIDRETGMRLLEAQIASGGVVDPVNSVFLPKDVALARGLIDRDLYRSLNDPRDSQKNFVDPVTKKKVSYVQLKERCRIEPHTGLLLLSVQKRSMSFQGIRQPVTVTELVDSGILRPSTVNELESGQISYDEVGERIKDFLQGSSCIAGIYNETTKQKLGIYEAMKIGLVRPGTALELLEAQAATGFIVDPVSNLRLPVEEAYKRGLVGIEFKEKLLSAERAVTGYNDPETGNIISLFQAMNKELIEKGHGIRLLEAQIATGGIIDPKESHRLPVDIAYKRGYFNEELSEILSDPSDDTKGFFDPNTEENLTYLQLKERCIKDEETGLCLLPLKEKKKQVQTSQKNTLRKRRVVIVDPETNKEMSVQEAYKKGLIDYETFKELCEQECEWEEITITGSDGSTRVVLVDRKTGSQYDIQDAIDKGLVDRKFFDQYRSGSLSLTQFADMISLKNGVGTSSSMGSGVSDDVFSSSRHESVSKISTISSVRNLTIRSSSFSDTLEESSPIAAIFDTENLEKISITEGIERGIVDSITGQRLLEAQACTGGIIHPTTGQKLSLQDAVSQGVIDQDMATRLKPAQKAFIGFEGVKGKKKMSAAEAVKEKWLPYEAGQRFLEFQYLTGGLVDPEVHGRISTEEAIRKGFIDGRAAQRLQDTSSYAKILTCPKTKLKISYKDAINRSMVEDITGLRLLEAASVSSKGLPSPYNMSSAPGSRSGSRSGSRSGSRSGSRSGSRRGSFDATGNSSYSYSYSFSSSSIGH

SEQ ID NO: 132 - protein, 514 aa, Homo sapiens
MSISSDEVNFLVYRYLQESGFSHSAFTFGIESHISQSNINGALVPPAALISIIQKGLQYVEAEVSINEDGTLFDGRPIESLSLIDAVMPDVVQTRQQAYRDKLAQQQAAAAAAAAAAASQQGSAKNGENTANGEENGAHTIANNHTDMMEVDGDVEIPPNKAVVLRGHESEVFICAWNPVSDLLASGSGDSTARIWNLSENSTSGSTQLVLRHCIREGGQDVPSNKDVTSLDWNSEGTLLATGSYDGFARIWTKDGNLASTLGQHKGPIFALKWNKKGNFILSAGVDKTTIIWDAHTGEAKQQFPFHSAPALDVDWQSNNTFASCSTDMCIHVCKLGQDRPIKTFQGHTNEVNAIKWDPTGNLLASCSDDMTLKIWSMKQDNCVHDLQAHNKEIYTIKWSPTGPGTNNPNANLMLASASFDSTVRLWDVDRGICIHTLTKHQEPVYSVAFSPDGRYLASGSFDKCVHIWNTQTGALVHSYRGTGGIFEVCWNAAGDKVGASASDGSVCVLDLRK

SEQ ID NO: 133 - protein, 1229 aa, Homo sapiens
MGASRDRGLAALWCLGLLGGLARVAGTHYRYLWRGCYPCHLGQAGYPVSAGDQRPDVDECRTHNGGCQHRCVNTPGSYLCECKPGFRLHTDSRTCLAINSCALGNGGCQHHCVQLTITRHRCQCRPGFQLQEDGRHCVRRSPCANRNGSCMHRCQVVRGLARCECHVGYQLAADGKACEDVDECAAGLAQCAHGCLNTQGSFKCVCHAGYELGADGRQCYRIEMEIVNSCEANNGGCSHGCSHTSAGPLCTCPRGYELDTDQRTCIDVDDCADSPCCQQVCTNNPGGYECGCYAGYRLSADGCGCEDVDECASSRGGCEHHCTNLAGSFQCSCEAGYRLHEDRRGCSPLEEPMVDLDGELPFVRPLPHIAVLQDELPQLFQDDDVGADEEEAELRGEHTLTEKFVCLDDSFGHDCSLTCDDCRNGGTCLLGLDGCDCPEGWTGLICNETCPPDTFGKNCSFSCSCQNGGTCDSVTGACRCPPGVSGTNCEDGCPKGYYGKHCRKKCNCANRGRCHRLYGACLCDPGLYGRFCHLTCPPWAFGPGCSEECQCVQPHTQSCDKRDGSCSCKAGFRGERCQAECELGYFGPGCWQACTCPVGVACDSVSGECGKRCPAGFQGEDCGQECPVGTFGVNCSSSCSCGGAPCHGVTGQCRCPPGRTGEDCEADCPEGRWGLGCQEICPACQHAARCDPETGACLCLPGFVGSRCQDVCPAGWYGPSCQTRCSCANDGHCHPATGHCSCAPGWTGFSCQRACDTGHWGPDCSHPCNCSAGHGSCDAISGLCLCEAGYVGPRCEQQCPQGHFGPGCEQRCQCQHGAACDHVSGACTCPAGWRGTFCEHACPAGFFGLDCRSACNCTAGAACDAVNGSCLCPAGRRGPRCAEKCLPRDVRAGCRHSGGCLNGGLCDPHTGRCLCPAGWTGDKCQSPCLRGWFGEACAQRCSCPPGAACHHVTGACRCPPGFTGSGCEQGCPPGRYGPGCEQLCGCLNGGSCDAATGACRCPTGFLGTDCNLTCPQGRFGPNCTHVCGCGQGAACDPVTGTCLCPPGRAGVRCERGCPQNRFGVGCEHTCSCRNGGLCHASNGSCSCGLGWTGRHCELACPPGRYGAACHLECSCHNNSTCEPATGTCRCGPGFYGQACEHRRSGATCNLDCRRGQFGPSCTLHCDCGGGADCDPVSGQCHCVDGYMGPTCREGGPLRLPENPSLAQGSAGTLPASSRPTSRSGGPARH

SEQ ID NO: 134 - protein, 1124 aa, Homo sapiens
MAPPSEETPLIPQRSCSLLSTEAGALHVLLPARGPGPPQRLSFSFGDHLAEDLCVQAAKASGILPVYHSLFALATEDLSCWFPPSHIFSVEDASTQVLLYRIRFYFPNWFGLEKCHRFGLRKDLASAILDLPVLEHLFAQHRSDLVSGRLPVGLSLKEQGECLSLAVLDLARMAREQAQRPGELLKTVSYKACLPPSLRDLIQGLSFVTRRRIRRTVRRALRRVAACQADRHSLMAKYIMDLERLDPAGAAETFHVGLPGALGGHDGLGLLRVAGDGGIAWTQGEQEVLQPFCDFPEIVDISIKQAPRVGPAGEHRLVTVTRTDNQILEAEFPGLPEALSFVALVDGYFRLTTDSQHFFCKEVAPPRLLEEVAEQCHGPITLDFAINKLKTGGSRPGSYVLRRSPQDFDSFLLTVCVQNPLGPDYKGCLIRRSPTGTFLLVGLSRPHSSLRELLATCWDGGLHVDGVAVTLTSCCIPRPKEKSNLIVVQRGHSPPTSSLVQPQSQYQLSQMTFHKIPADSLEWHENLGHGSFTKIYRGCRHEVVDGEARKTEVLLKVMDAKHKNCMESFLEAASLMSQVSYRHLVLLHGVCMAGDSTMVQEFVHLGAIDMYLRKRGHLVPASWKLQVVKQLAYALNYLEDKGLPHGNVSARKVLLAREGADGSPPFIKLSDPGVSPAVLSLEMLTDRIPWVAPECLREAQTLSLEADKWGFGATVWEVFSGVTMPISALDPAKKLQFYEDRQQLPAPKWTELALLIQQCMAYEPVQRPSFRAVIRDLNSLISSDYELLSDPTPGALAPRDGLWNGAQLYACQDPTIFEERHLKYISQLGKGNFGSVELCRYDPLGDNTGALVAVKQLQHSGPDQQRDFQREIQILKALHSDFIVKYRGVSYGPGRQSLRLVMEYLPSGCLRDFLQRHRARLDASRLLLYSSQICKGMEYLGSRRCVHRDLAARNILVESEAHVKIADFGLAKLLPLDKDYYVVREPGQSPIFWYAPESLSDNIFSRQSDVWSFGVVLYELFTYCDKSCSPSAEFLRMMGCERDVPALCRLLELLEEGQRLPAPPACPAEVHELMKLCWAPSPQDRPSFSALGPQLDMLWSGSRGCETHAFTAHPEGKHHSLSFS

SEQ ID NO: 135 - protein, 778 aa, Homo sapiens
MTTRQATKDPLLRGVSPTPSKIPVRSQKRTPFPTVTSCAVDQENQDPRRWVQKPPLNIQRPLVDSAGPRPKARHQAETSQRLVGISQPRNPLEELRPSPRGQNVGPGPPAQTEAPGTIEFVADPAALATILSGEGVKSCHLGRQPSLAKRVLVRGSQGGTTQRVQGVRASAYLAPRTPTHRLDPARASCFSRLEGPGPRGRTLCPQRLQALISPSGPSFHPSTHPSFQELRRETAGSSRTSVSQASGLLLETPVQPAFSLPKGEREVVTHSDEGGVASLGLAQRVPLRENREMSHTRDSHDSHLMPSPAPVAQPLPGHVVPCPSPFGRAQRVPSPGPPTLTSYSVLRRLTVQPKTRFTPMPSTPRVQQAQWLRGVSPQSCSEDPALPWEQVAVRLFDQESCIRSLEGSGKPPVATPSGPHSNRTPSLQEVKIQRIGILQQLLRQEVEGLVGGQCVPLNGGSSLDMVELQPLLTEISRTLNATEHNSGTSHLPGLLKHSGLPKPCLPEECGEPQPCPPAEPGPPEAFCRSEPEIPEPSLQEQLEVPEPYPPAEPRPLESCCRSEPEIPESSRQEQLEVPEPCPPAEPRPLESYCRIEPEIPESSRQEQLEVPEPCPPAEPGPLQPSTQGQSGPPGPCPRVELGASEPCTLEHRSLESSLPPCCSQWAPATTSLIFSSQHPLCASPPICSLQSLRPPAGQAGLSNLAPRTLALRERLKSCLTAIHCFHEARLDDECAFYTSRAPPSGPTRVCTNPVATLLEWQDALCFIPVGSAAPQGSP

SEQ ID NO: 136 - protein, 2843 aa, Homo sapiens
MAAASYDQLLKQVEALKMENSNLRQELEDNSNHLTKLETEASNMKEVLKQLQGSIEDEAMASSGQIDLLERLKELNLDSSNFPGVKLRSKMSLRSYGSREGSVSSRSGECSPVPMGSFPRRGFVNGSRESTGYLEELEKERSLLLADLDKEEKEKDWYYAQLQNLTKRIDSLPLTENFSLQTDMTRRQLEYEARQIRVAMEEQLGTCQDMEKRAQRRIARIQQIEKDILRIRQLLQSQATEAERSSQNKHETGSHDAERQNEGQGVGEINMATSGNGQGSTTRMDHETASVLSSSSTHSAPRRLTSHLGTKVEMVYSLLSMLGTHDKDDMSRTLLAMSSSQDSCISMRQSGCLPLLIQLLHGNDKDSVLLGNSRGSKEARARASAALHNIIHSQPDDKRGRREIRVLHLLEQIRAYCETCWEWQEAHEPGMDQDKNPMPAPVEHQICPAVCVLMKLSFDEEHRHAMNELGGLQAIAELLQVDCEMYGLTNDHYSITLRRYAGMALTNLTFGDVANKATLCSMKGCMRALVAQLKSESEDLQQVIASVLRNLSWRADVNSKKTLREVGSVKALMECALEVKKESTLKSVLSALWNLSAHCTENKADICAVDGALAFLVGTLTYRSQTNTLAIIESGGGILRNVSSLIATNEDHRQILRENNCLQTLLQHLKSHSLTIVSNACGTLWNLSARNPKDQEALWDMGAVSMLKNLIHSKHKMIAMGSAAALRNLMANRPAKYKDANIMSPGSSLPSLHVRKQKALEAELDAQHLSETFDNIDNLSPKASHRSKQRHKQSLYGDYVFDTNRHDDNRSDNFNTGNMTVLSPYLNTTVLPSSSSSRGSLDSSRSEKDRSLERERGIGLGNYHPATENPGTSSKRGLQISTTAAQIAKVMEEVSAIHTSQEDRSSGSTTELHCVTDERNALRRSSAAHTHSNTYNFTKSENSNRTCSMPYAKLEYKRSSNDSLNSVSSSDGYGKRGQMKPSIESYSEDDESKFCSYGQYPADLAHKIHSANHMDDNDGELDTPINYSLKYSDEQLNSGRQSPSQNERWARPKHIIEDEIKQSEQRQSRNQSTTYPVYTESTDDKHLKFQPHFGQQECVSPYRSRGANGSETNRVGSNHGINQNVSQSLCQEDDYEDDKPTNYSERYSEEEQHEEEERPTNYSIKYNEEKRHVDQPIDYSLKYATDIPSSQKQSFSFSKSSSGQSSKTEHMSSSSENTSTPSSNAKRQNQLHPSSAQSRSGQPQKAATCKVSSINQETIQTYCVEDTPICFSRCSSLSSLSSAEDEIGCNQTTQEADSANTLQIAEIKEKIGTRSAEDPVSEVPAVSQHPRTKSSRLQGSSLSSESARHKAVEFSSGAKSPSKSGAQTPKSPPEHYVQETPLMFSRCTSVSSLDSFESRSIASSVQSEPCSGMVSGIISPSDLPDSPGQTMPPSRSKTPPPPPQTAQTKREVPKNKAPTAEKRESGPKQAAVNAAVQRVQVLPDADTLLHFATESTPDGFSCSSSLSALSLDEPFIQKDVELRIMPPVQENDNGNETESEQPKESNENQEKEAEKTIDSEKDLLDDSDDDDIEILEECIISAMPTKSSRKAKKPAQTASKLPPPVARKPSQLPVYKLLPSQNRLQPQKHVSFTPGDDMPRVYCVEGTPINFSTATSLSDLTIESPPNELAAGEGVRGGAQSGEFEKRDTIPTEGRSTDEAQGGKTSSVTIPELDDNKAEEGDILAECINSAMPKGKSHKPFRVKKIMDQVQQASASSSAPNKNQLDGKKKKPTSPVKPIPQNTEYRTRVRKNADSKNNLNAERVFSDNKDSKKQNLKNNSKVFNDKLPNNEDRVRGSFAFDSPHHYTPIEGTPYCFSRNDSLSSLDFDDDDVDLSREKAELRKAKENKESEAKVTSHTELTSNQQSANKTQAIAKQPINRGQPKPILQKQSTFPQSSKDIPDRGAATDEKLQNFAIENTPVCFSHNSSLSSLSDIDQENNNKENEPIKETEPPDSQGEPSKPQASGYAPKSFHVEDTPVCFSRNSSLSSLSIDSEDDLLQECISSAMPKKKKPSRLKGDNEKHSPRNMGGILGEDLTLDLKDIQRPDSEHGLSPDSENFDWKAIQEGANSIVSSLHQAAAAACLSRQASSDSDSILSLKSGISLGSPFHLTPDQEEKPFTSNKGPRILKPGEKSTLETKKIESESKGIKGGKKVYKSLITGKVRSNSEISGQMKQPLQANMPSISRGRTMIHIPGVRNSSSSTSPVSKKGPPLKTPASKSPSEGQTATTSPRGAKPSVKSELSPVARQTSQIGGSSKAPSRSGSRDSTPSRPAQQPLSRPIQSPGRNSISPGRNGISPPNKLSQLPRTSSPSTASTKSSGSGKMSYTSPGRQMSQQNLTKQTGLSKNASSIPRSESASKGLNQMNNGNGANKKVELSRMSSTKSSGSESDRSERPVLVRQSTFIKEAPSPTLRRKLEESASFESLSPSSRPASPTRSQAQTPVLSPSLPDMSLSTHSSVQAGGWRKLPPNLSPTIEYNDGRPAKRHDIARSHSESPSRLPINRSGTWKREHSKHSSSLPRVSTWRRTGSSSSILSASSESSEKAKSEDEKHVNSISGTKQSKENQVSAKGTWRKIKENEFSPTNSTSQTVSSGATNGAESKTLIYQMAPAVSKTEDVWVRIEDCPINNPRSGRSPTGNTPPVIDSVSEKANPNIKDSKDNQAKQNVGNGSVPMRTVGLENRLNSFIQVDAPDQKGTEIKPGQNNPVPVSETNESSIVERTPFSSSSSSKHSSPSGTVAARVTPFNYNPSPRKSSADSTSARPSQIPTPVNNNTKKRDSKTDSTESSGTQSPKRHSGSYLVTSV

SEQ ID NO: 137 - protein, 433 aa, Homo sapiens
MALRVTRNSKINAENKAKINMAGAKRVPTAPAATSKPGLRPRTALGDIGNKVSEQLQAKMPMKKEAKPSATGKVIDKKLPKPLEKVPMLVPVPVSEPVPEPEPEPEPEPVKEEKLSPEPILVDTASPSPMETSGCAPAEEDLCQAFSDVILAVNDVDAEDGADPNLCSEYVKDIYAYLRQLEEEQAVRPKYLLGREVTGNMRAILIDWLVQVQMKFRLLQETMYMTVSIIDRFMQNNCVPKKMLQLVGVTAMFIASKYEEMYPPEIGDFAFVTDNTYTKHQIRQMEMKILRALNFGLGRPLPLHFLRRASKIGEVDVEQHTLAKYLMELTMLDYDMVHFPPSQIAAGAFCLALKILDNGEWTPTLQHYLSYTEESLLPVMQHLAKNVVMVNQGLTKHMTVKNKYATSKHAKISTLPQLNSALVQDLAKAVAKV

SEQ ID NO: 138 - protein, 1093 aa, Homo sapiens
MVLAGPLAVSLLLPSLTLLVSHLSSSQDVSSEPSSEQQLCALSKHPTVAFEDLQPWVSNFTYPGARDFSQLALDPSGNQLIVGARNYLFRLSLANVSLLQATEWASSEDTRRSCQSKGKTEEECQNYVRVLIVAGRKVFMCGTNAFSPMCTSRQVGNLSRTTEKINGVARCPYDPRHNSTAVISSQGELYAATVIDFSGRDPAIYRSLGSGPPLRTAQYNSKWLNEPNFVAAYDIGLFAYFFLRENAVEHDCGRTVYSRVARVCKNDVGGRFLLEDTWTTFMKARLNCSRPGEVPFYYNELQSAFHLPEQDLIYGVFTTNVNSIAASAVCAFNLSAISQAFNGPFRYQENPRAAWLPIANPIPNFQCGTLPETGPNENLTERSLQDAQRLFLMSEAVQPVTPEPCVTQDSVRFSHLVVDLVQAKDTLYHVLYIGTESGTILKALSTASRSLHGCYLEELHVLPPGRREPLRSLRILHSARALFVGLRDGVLRVPLERCAAYRSQGACLGARDPYCGWDGKQQRCSTLEDSSNMSLWTQNITACPVRNVTRDGGFGPWSPWQPCEHLDGDNSGSCLCRARSCDSPRPRCGGLDCLGPAIHIANCSRNGAWTPWSSWALCSTSCGIGFQVRQRSCSNPAPRHGGRICVGKSREERFCNENTPCPVPIFWASWGSWSKCSSNCGGGMQSRRRACENGNSCLGCGVEFKTCNPEGCPEVRRNTPWTPWLPVNVTQGGARQEQRFRFTCRAPLADPHGLQFGRRRTETRTCPADGSGSCDTDALVEDLLRSGSTSPHTVSGGWAAWGPWSSCSRDCELGFRVRKRTCTNPEPRNGGLPCVGDAAEYQDCNPQACPVRGAWSCWTSWSPCSASCGGGHYQRTRSCTSPAPSPGEDICLGLHTEEALCATQACPEGWSPWSEWSKCTDDGAQSRSRHCEELLPGSSACAGNSSQSRPCPYSEIPVILPASSMEEATGCAGFNLIHLVATGISCFLGSGLLTLAVYLSCQHCQRQSQESTLVHPATPNHLHYKGGGTPKNEKYTPMEFKTLNKNNLIPDDRANFYPLQQTNVYTTTYYPSPLNKHSFRPEASPGQRCFPNS

SEQ ID NO: 139 - protein, 1613 aa, Homo sapiens
MGAVLRSLLACSFCVLLRAAPLLLYANRRDLRLVDATNGKENATIVVGGLEDAAAVDFVFSHGLIYWSDVSEEAIKRTEFNKTESVQNVVVSGLLSPDGLACDWLGEKLYWTDSETNRIEVSNLDGSLRKVLFWQELDQPRAIALDPSSGFMYWTDWGEVPKIERAGMDGSSRFIIINSEIYWPNGLTLDYEEQKLYWADAKLNFIHKSNLDGTNRQAVVKGSLPHPFALTLFEDILYWTDWSTHSILACNKYTGEGLREIHSDIFSPMDIHAFSQQRQPNATNPCGIDNGGCSHLCLMSPVKPFYQCACPTGVKLLENGKTCKDGATELLLLARRTDLRRISLDTPDFTDIVLQLEDIRHAIAIDYDPVEGYIYWTDDEVRAIRRSFIDGSGSQFVVTAQIAHPDGIAVDWVARNLYWTDTGTDRIEVTRLNGTMRKILISEDLEEPRAIVLDPMVGYMYWTDWGEIPKIERAALDGSDRVVLVNTSLGWPNGLALDYDEGKIYWGDAKTDKIEVMNTDGTGRRVLVEDKIPHIFGFTLLGDYVYWTDWQRRSIERVHKRSAEREVIIDQLPDLMGLKATNVHRVIGSNPCAEENGGCSHLCLYRPQGLRCACPIGFELISDMKTCIVPEAFLLFSRRADIRRISLETNNNNVAIPLTGVKEASALDFDVTDNRIYWTDISLKTISRAFMNGSALEHVVEFGLDYPEGMAVDWLGKNLYWADTGTNRIEVSKLDGQHRQVLVWKDLDSPRALALDPAEGFMYWTEWGGKPKIDRAAMDGSERTTLVPNVGRANGLTIDYAKRRLYWTDLDTNLIESSNMLGLNREVIADDLPHPFGLTQYQDYIYWTDWSRRSIERANKTSGQNRTIIQGHLDYVMDILVFHSSRQSGWNECASSNGHCSHLCLAVPVGGFVCGCPAHYSLNADNRTCSAPTTFLLFSQKSAINRMVIDEQQSPDIILPIHSLRNVRAIDYDPLDKQLYWIDSRQNMIRKAQEDGSQGFTVVVSSVPSQNLEIQPYDLSIDIYSRYIYWTCEATNVINVTRLDGRSVGVVLKGEQDRPRAIVVNPEKGYMYFTNLQERSPKIERAALDGTEREVLFFSGLSKPIALALDSRLGKLFWADSDLRRIESSDLSGANRIVLEDSNILQPVGLTVFENWLYWIDKQQQMIEKIDMTGREGRTKVQARIAQLSDIHAVKELNLQEYRQHPCAQDNGGCSHICLVKGDGTTRCSCPMHLVLLQDELSCGEPPTCSPQQFTCFTGEIDCIPVAWRCDGFTECEDHSDELNCPVCSESQFQCASGQCIDGALRCNGDANCQDKSDEKNCEVLCLIDQFRCANGQCIGKHKKCDHNVDCSDKSDELDCYPTEEPAPQATNTVGSVIGVIVTIFVSGTVYFICQRMLCPRMKGDGETMTNDYVVHGPASVPLGYVPHPSSLSGSLPGMSRGKSMISSLSIMGGSSGPPYDRAHVTGASSSSSSSTKGTYFPAILNPPPSPATERSHYTMEFGYSSNSPSTHRSYSYRPYSYRHFAPPTTPCSTDVCDSDYAPSRRMTSVATAKGYTSDLNYDSEPVPPPPTPRSQYLSAEENYESCPPSPYTERSYSHHLYPPPPSPCTDSS

SEQ ID NO: 140 - protein, 1269 aa, Homo sapiens
MEATGVLPFVRGVDLSGNDFKGGYFPENVKAMTSLRWLKLNRTGLCYLPEELAALQKLEHLSVSHNNLTTLHGELSSLPSLRAIVARANSLKNSGVPDDIFKLDDLSVLDLSHNQLTECPRELENAKNMLVLNLSHNSIDTIPNQLFINLTDLLYLDLSENRLESLPPQMRRLVHLQTLVLNGNPLLHAQLRQLPAMTALQTLHLRSTQRTQSNLPTSLEGLSNLADVDLSCNDLTRVPECLYTLPSLRRLNLSSNQITELSLCIDQWVHVETLNLSRNQLTSLPSAICKLSKLKKLYLNSNKLDFDGLPSGIGKLTNLEEFMAANNNLELVPESLCRCPKLRKLVLNKNHLVTLPEAIHFLTEIEVLDVRENPNLVMPPKPADRAAEWYNIDFSLQNQLRLAGASPATVAAAAAAGSGPKDPMARKMRLRRRKDSAQDDQAKQVLKGMSDVAQEKNKKQEESADARAPSGKVRRWDQGLEKPRLDYSEFFTEDVGQLPGLTIWQIENFVPVLVEEAFHGKFYEADCYIVLKTFLDDSGSLNWEIYYWIGGEATLDKKACSAIHAVNLRNYLGAECRTVREEMGDESEEFLQVFDNDISYIEGGTASGFYTVEDTHYVTRMYRVYGKKNIKLEPVPLKGTSLDPRFVFLLDRGLDIYVWRGAQATLSSTTKARLFAEKINKNERKGKAEITLLVQGQELPEFWEALGGEPSEIKKHVPEDFWPPQPKLYKVGLGLGYLELPQINYKLSVEHKQRPKVELMPRMRLLQSLLDTRCVYILDCWSDVFIWLGRKSPRLVRAAALKLGQELCGMLHRPRHATVSRSLEGTEAQVFKAKFKNWDDVLTVDYTRNAEAVLQSPGLSGKVKRDAEKKDQMKADLTALFLPRQPPMSLAEAEQLMEEWNEDLDGMEGFVLEGKKFARLPEEEFGHFYTQDCYVFLCRYWVPVEYEEEEKKEDKEEKAEGKEGEEATAEAEEKQPEEDFQCIVYFWQGREASNMGWLTFTFSLQKKFESLFPGKLEVVRMTQQQENPKFLSHFKRKFIIHRGKRKAVQGAQQPSLYQIRTNGSALCTRCIQINTDSSLLNSEFCFILKVPFESEDNQGIVYAWVGRASDPDEAKLAEDILNTMFDTSYSKQVINEGEEPENFFWVGIGAQKPYDDDAEYMKHTRLFRCSNEKGYFAVTEKCSDFCQDDLADDDIMLLDNGQEVYMWVGTQTSQVEIKLSLKACQVYIQHMRSKEHERPRRLRLVRKGNEQHAFTRCFHAWSAFCKALA

SEQ ID NO: 141 - protein, 589 aa, Homo sapiens
MSVSVHENRKSRASSGSINIYLFHKSSYADSVLTHLNLLRQQRLFTDVLLHAGNRTFPCHRAVLAACSRYFEAMFSGGLKESQDSEVNFDNSIHPEVLELLLDYAYSSRVIINEENAESLLEAGDMLEFQDIRDACAEFLEKNLHPTNCLGMLLLSDAHQCTKLYELSWRMCLSNFQTIRKNEDFLQLPQDMVVQLLSSEELETEDERLVYESAINWISYDLKKRYCYLPELLQTVRLALLPAIYLMENVAMEELITKQRKSKEIVEEAIRCKLKILQNDGVVTSLCARPRKTGHALFLLGGQTFMCDKLYLVDQKAKEIIPKADIPSPRKEFSACAIGCKVYITGGRGSENGVSKDVWVYDTLHEEWSKAAPMLVARFGHGSAELKHCLYVVGGHTAATGCLPASPSVSLKQVEHYDPTINKWTMVAPLREGVSNAAVVSAKLKLFAFGGTSVSHDKLPKVQCYDQCENRWTVPATCPQPWRYTAAAVLGNQIFIMGGDTEFSACSAYKFNSETYQWTKVGDVTAKRMSCHAVASGNKLYVVGGYFGIQRCKTLDCYDPTLDVWNSITTVPYSLIPTAFVSTWKHLPS

SEQ ID NO: 142 - protein, 2541 aa, Homo sapiens
MVALSLKISIGNVVKTMQFEPSTMVYDACRIIRERIPEAPAGPPSDFGLFLSDDDPKKGIWLEAGKALDYYMLRNGDTMEYRKKQRPLKIRMLDGTVKTIMVDDSKTVTDMLMTICARIGITNHDEYSLVRELMEEKKEEITGTLRKDKTLLRDEKKMEKLKQKLHTDDELNWLDHGRTLREQGVEEHETLLLRRKFFYSDQNVDSRDPVQLNLLYVQARDDILNGSHPVSFDKACEFAGFQCQIQFGPHNEQKHKAGFLDLKDFLPKEYVKQKGERKIFQAHKNCGQMSEIEAKVRYVKLARSLKTYGVSFFLVKEKMKGKNKLVPRLLGITKECVMRVDEKTKEVIQEWNLTNIKRWAASPKSFTLDFGDYQDGYYSVQTTEGEQIAQLIAGYIDIILKKKKSKDHFGLEGDEESTMLEDSVSPKKSTVLQQQYNRVGKVEHGSVALPAIMRSGASGPENFQVGSMPPAQQQITSGQMHRGHMPPLTSAQQALTGTINSSMQAVQAAQATLDDFDTLPPLGQDAASKAWRKNKMDESKHEIHSQVDAITAGTASVVNLTAGDPAETDYTAVGCAVTTISSNLTEMSRGVKLLAALLEDEGGSGRPLLQAAKGLAGAVSELLRSAQPASAEPRQNLLQAAGNVGQASGELLQQIGESDTDPHFQDALMQLAKAVASAAAALVLKAKSVAQRTEDSGLQTQVIAAATQCALSTSQLVACTKVVAPTISSPVCQEQLVEAGRLVAKAVEGCVSASQAATEDGQLLRGVGAAATAVTQALNELLQHVKAHATGAGPAGRYDQATDTILTVTENIFSSMGDAGEMVRQARILAQATSDLVNAIKADAEGESDLENSRKLLSAAKILADATAKMVEAAKGAAAHPDSEEQQQRLREAAEGLRMATNAAAQNAIKKKLVQRLEHAAKQAAASATQTIAAAQHAASTPKASAGPQPLLVQSCKAVAEQIPLLVQGVRGSQAQPDSPSAQLALIAASQSFLQPGGKMVAAAKASVPTIQDQASAMQLSQCAKNLGTALAELRTAAQKAQEACGPLEMDSALSVVQNLEKDLQEVKAAARDGKLKPLPGETMEKCTQDLGNSTKAVSSAIAQLLGEVAQGNENYAGIAARDVAGGLRSLAQAARGVAALTSDPAVQAIVLDTASDVLDKASSLIEEAKKAAGHPGDPESQQRLAQVAKAVTQALNRCVSCLPGQRDVDNALRAVGDASKRLLSDSLPPSTGTFQEAQSRLNEAAAGLNQAATELVQASRGTPQDLARASGRFGQDFSTFLEAGVEMAGQAPSQEDRAQVVSNLKGISMSSSKLLLAAKALSTDPAAPNLKSQLAAAARAVTDSINQLITMCTQQAPGQKECDNALRELETVRELLENPVQPINDMSYFGCLDSVMENSKVLGEAMTGISQNAKNGNLPEFGDAISTASKALCGFTEAAAQAAYLVGVSDPNSQAGQQGLVEPTQFARANQAIQMACQSLGEPGCTQAQVLSAATIVAKHTSALCNSCRLASARTTNPTAKRQFVQSAKEVANSTANLVKTIKALDGAFTEENRAQCRAATAPLLEAVDNLSAFASNPEFSSIPAQISPEGRAAMEPIVISAKTMLESAGGLIQTARALAVNPRDPPSWSVLAGHSRTVSDSIKKLITSMRDKAPGQLECETAIAALNSCLRDLDQASLAAVSQQLAPREGISQEALHTQMLTAVQEISHLIEPLANAARAEASQLGHKVSQMAQYFEPLTLAAVGAASKTLSHPQQMALLDQTKTLAESALQLLYTAKEAGGNPKQAAHTQEALEEAVQMMTEAVEDLTTTLNEAASAAGVVGGMVDSITQAINQLDEGPMGEPEGSFVDYQTTMVRTAKAIAVTVQEMVTKSNTSPEELGPLANQLTSDYGRLASEAKPAAVAAENEEIGSHIKHRVQELGHGCAALVTKAGALQCSPSDAYTKKELIECARRVSEKVSHVLAALQAGNRGTQACITAASAVSGIIADLDTTIMFATAGTLNREGTETFADHREGILKTAKVLVEDTKVLVQNAAGSQEKLAQAAQSSVATITRLADVVKLGAASLGAEDPETQVVLINAVKDVAKALGDLISATKAAAGKVGDDPAVWQLKNSAKVMVTNVTSLLKTVKAVEDEATKGTRALEATTEHIRQELAVFCSPEPPAKTSTPEDFIRMTKGITMATAKAVAAGNSCRQEDVIATANLSRRAIADMLRACKEAAYHPEVAPDVRLRALHYGRECANGYLELLDHVLLTLQKPSPELKQQLTGHSKRVAGSVTELIQAAEAMKGTEWVDPEDPTVIAENELLGAAAAIEAAAKKLEQLKPRAKPKEADESLNFEEQILEAAKSIAAATSALVKAASAAQRELVAQGKVGAIPANALDDGQWSQGLISAARMVAAATNNLCEAANAAVQGHASQEKLISSAKQVAASTAQLLVACKVKADQDSEAMKRLQAAGNAVKRASDNLVKAAQKAAAFEEQENETVVVKEKMVGGIAQIIAAQEEMLRKERELEEARKKLAQIRQQQYKFLPSELRDEH

SEQ ID NO: 143 - protein, 888 aa, Homo sapiens
MQTPRASPPRPALLLLLLLLGGAHGLFPEEPPPLSVAPRDYLNHYPVFVGSGPGRLTPAEGADDLNIQRVLRVNRTLFIGDRDNLYRVELEPPTSTELRYQRKLTWRSNPSDINVCRMKGKQEGECRNFVKVLLLRDESTLFVCGSNAFNPVCANYSIDTLQPVGDNISGMARCPYDPKHANVALFSDGMLFTATVTDFLAIDAVIYRSLGDRPTLRTVKHDSKWFKEPYFVHAVEWGSHVYFFFREIAMEFNYLEKVVVSRVARVCKNDVGGSPRVLEKQWTSFLKARLNCSVPGDSHFYFNVLQAVTGVVSLGGRPVVLAVFSTPSNSIPGSAVCAFDLTQVAAVFEGRFREQKSPESIWTPVPEDQVPRPRPGCCAAPGMQYNASSALPDDILNFVKTHPLMDEAVPSLGHAPWILRTLMRHQLTRVAVDVGAGPWGNQTVVFLGSEAGTVLKFLVRPNASTSGTSGLSVFLEEFETYRPDRCGRPGGGETGQRLLSLELDAASGGLLAAFPRCVVRVPVARCQQYSGCMKNCIGSQDPYCGWAPDGSCIFLSPGTRAAFEQDVSGASTSGLGDCTGLLRASLSEDRAGLVSVNLLVTSSVAAFVVGAVVSGFSVGWFVGLRERRELARRKDKEAILAHGAGEAVLSVSRLGERRAQGPGGRGGGGGGGAGVPPEALLAPLMQNGWAKATLLQGGPHDLDSGLLPTPEQTPLPQKRLPTPHPHPHALGPRAWDHGHPLLPASASSSLLLLAPARAPEQPPAPGEPTPDGRLYAARPGRASHGDFPLTPHASPDRRRVVSAPTGPLDPASAADGLPRPWSPPPTGSLRRPLGPHAPPAATLRRTHTFNSGEARPGDRHRGCHARPGTDLAHLLPYGGADRTAPPVP

SEQ ID NO: 144 - protein, 465 aa, Homo sapiens
STRSVSSSSYRRMFGGPGTASRPSSSRSYVTTSTRTYSLGSALRPSTSRSLYASSPGGVYATRSSAVRLRSSVPGVRLLQDSVDFSLADAINTEFKNTRTNEKVELQELNDRFANYIDKVRFLEQQNKILLAELEQLKGQGKSRLGDLYEEEMRELRRQVDQLTNDKARVEVERDNLAEDIMRLREKLQEEMLQREEAENTLQSFRQDVDNASLARLDLERKVESLQEEIAFLKKLHEEEIQELQAQIQEQHVQIDVDVSKPDLTAALRDVRQQYESVAAKNLQEAEEWYKSKFADLSEAANRNNDALRQAKQESTEYRRQVQSLTCEVDALKGTNESLERQMREMEENFAVEAANYQDTIGRLQDEIQNMKEEMARHLREYQDLLNVKMALDIEIATYRKLLEGEESRISLPLPNFSSLNLRETNLDSLPLVDTHSKRTLLIKTVETRDGQVINETSQHHDDLE

SEQ ID NO: 145 - protein, 316 aa, Homo sapiens
MLSLNNLQNIIYNPVIPYVGTIPDQLDPGTLIVICGHVPSDADRFQVDLQNGSSVKPRADVAFHFNPRFKRAGCIVCNTLINEKWGREEITYDTPFKREKSFEIVIMVLKDKFQVAVNGKHTLLYGHRIGPEKIDTLGIYGKVNIHSIGFSFSSDLQSTQASSLELTEISRENVPKSGTPQLSLPFAARLNTPMGPGRTVVVKGEVNANAKSFNVDLLAGKSKDIALHLNPRLNIKAFVRNSFLQESWGEEERNITSFPFSPGMYFEMIIYCDVREFKVAVNGVHSLEYKHRFKELSSIDTLEINGDIHLLEVRSW

SEQ ID NO: 146 - protein, 370 aa, Homo sapiens
MGLWALLPGWVSATLLLALAALPAALAANSSGRWWGIVNVASSTNLLTDSKSLQLVLEPSLQLLSRKQRRLIRQNPGILHSVSGGLQSAVRECKWQFRNRRWNCPTAPGPHLFGKIVNRGCRETAFIFAITSAGVTHSVARSCSEGSIESCTCDYRRRGPGGPDWHWGGCSDNIDFGRLFGREFVDSGEKGRDLRFLMNLHNNEAGRTTVFSEMRQECKCHGMSGSCTVRTCWMRLPTLRAVGDVLRDRFDGASRVLYGNRGSNRASRAELLRLEPEDPAHKPPSPHDLVYFEKSPNFCTYSGRLGTAGTAGRACNSSSPALDGCELLCCGRGHRTRTQRVTERCNCTFHWCCHVSCRNCTHTRVLHECL

SEQ ID NO: 147 - protein, 781 aa, Homo sapiens
MATQADLMELDMAMEPDRKAAVSHWQQQSYLDSGIHSGATTTAPSLSGKGNPEEEDVDTSQVLYEWEQGFSQSFTQEQVADIDGQYAMTRAQRVRAAMFPETLDEGMQIPSTQFDAAHPTNVQRLAEPSQMLKHAVVNLINYQDDAELATRAIPELTKLLNDEDQVVVNKAAVMVHQLSKKEASRHAIMRSPQMVSAIVRTMQNTNDVETARCTAGTLHNLSHHREGLLAIFKSGGIPALVKMLGSPVDSVLFYAITTLHNLLLHQEGAKMAVRLAGGLQKMVALLNKTNVKFLAITTDCLQILAYGNQESKLIILASGGPQALVNIMRTYTYEKLLWTTSRVLKVLSVCSSNKPAIVEAGGMQALGLHLTDPSQRLVQNCLWTLRNLSDAATKQEGMEGLLGTLVQLLGSDDINVVTCAAGILSNLTCNNYKNKMMVCQVGGIEALVRTVLRAGDREDITEPAICALRHLTSRHQEAEMAQNAVRLHYGLPVVVKLLHPPSHWPLIKATVGLIRNLALCPANHAPLREQGAIPRLVQLLVRAHQDTQRRTSMGGTQQQFVEGVRMEEIVEGCTGALHILARDVHNRIVIRGLNTIPLFVQLLYSPIENIQRVAAGVLCELAQDKEAAEAIEAEGATAPLTELLHSRNEGVATYAAAVLFRMSEDKPQDYKKRLSVELTSSLFRTEPMAWNETADLGLDIGAQGEPLGYRQDDPSYRSFHSGGYGQDALGMDPMMEHEMGGHHPGADYPVDGLPDLGHAQDLMDGLPPGDSNQLAWFDTDL

SEQ ID NO: 148 - protein, 469 aa, Homo sapiens [sequence omitted]

SEQ ID NO: 149 - protein, 379 aa, Homo sapiens
MLKRCGRRLLLALAGALLACLLVLTADPPPPPLPAERGRRALRSLAGPAGAAPAPGLGAAAAAPGALVRDVHSLSEYFSLLTRARRDAGPPPGAAPRPADGHPRPLAEPLAPRDVFIAVKTTKKFHRARLDLLLETWISRHKEMTFIFTDGEDEALARHTGNVVITNCSAAHSRQALSCKMAVEYDRFIESGRKWFCHVDDDNYVNLRALLRLLASYPHTRDVYVGKPSLDRPIQAMERVSENKVRPVHFWFATGGAGFCISRGLALKMSPWASGGHFMNTAERIRLPDDCTIGYIVEALLGVPLIRSGLFHSHLENLQQVPTSELHEQVTLSYGMFENKRNAVHVKGPFSVEADPSRFRSIHCHLYPDTPWCPRTAIF

SEQ ID NO: 150 - protein, 468 aa, Homo sapiens
SIHFSSPVFTSRSAAFSGRGAQVRLSSARPGGLGSSSLYGLGASRPRVAVRSAYGGPVGAGIREVTINQSLLAPLRLDADPSLQRVRQEESEQIKTLNNKFASFIDKVRFLEQQNKLLETKWTLLQEQKSAKSSRLPDIFEAQIAGLRGQLEALQVDGGRLEQGLRTMQDVVEDFKNKYEDEINRRTAAENEFVVLKKDVDAAYMSKVELEAKVDALNDEINFLRTLNETELTELQSQISDTSVVLSMDNSRSLDLDGIIAEVKAQYEEMAKCSRAEAEAWYQTKFETLQAQAGKHGDDLRNTRNEISEMNRAIQRLQAEIDNIKNQRAKLEAAIAEAEERGELALKDARAKQEELEAALQRAKQDMARQLREYQELMSVKLALDIEIATYRKLLEGEESRLAGDGVGAVNISVMNSTGGSSSGGGIGLTLGGTMGSNALSFSSSAGPGLLKAYSIRTASASRRSARD

SEQ ID NO: 151 - protein, 205 aa, Homo sapiens
MEFLWAPLLGLCCSLAAADRHTVFWNSSNPKFRNEDYTIHVQLNDYVDIICPHYEDHSVADAAMEQYILYLVEHEEYQLCQPQSKDQVRWQCNRPSAKHGPEKLSEKFQRFTPFTLGKEFKEGHSYYYISKPIHQHEDRCLRLKVTVSGKITHSPQAHDNPQEKRLAADDPEVRVLHSIGHSAAPRLFPLAWTVLLLPLLLLQTP

SEQ ID NO: 152 - protein, 153 aa, Homo sapiens
MNVGTAHSEVNPNTRVMNSRGIWLSYVLAIGLLHIVLLSIPFVSVPVVWTLTNLIHNMGMYIFLHTVKGTPFETPDQGKARLLTHWEQMDYGVQFTASRKFLTITPIVLYFLTSFYTKYDQIHFVLNTVSLMSVLIPKLPQLHGVRIFGINKY

SEQ ID NO: 153 - protein, 1165 aa, Homo sapiens
MICQKFCVVLLHWEFIYVITAFNLSYPITPWRFKLSCMPPNSTYDYFLLPAGLSKNTSNSNGHYETAVEPKFNSSGTHFSNLSKTTFHCCFRSEQDRNCSLCADNIEGKTFVSTVNSLVFQQIDANWNIQCWLKGDLKLFICYVESLFKNLFRNYNYKVHLLYVLPEVLEDSPLVPQKGSFQMVHCNCSVHECCECLVPVPTAKLNDTLLMCLKITSGGVIFQSPLMSVQPINMVKPDPPLGLHMEITDDGNLKISWSSPPLVPFPLQYQVKYSENSTTVIREADKIVSATSLLVDSILPGSSYEVQVRGKRLDGPGIWSDWSTPRVFTTQDVIYFPPKILTSVGSNVSFHCIYKKENKIVPSKEIVWWMNLAEKIPQSQYDVVSDHVSKVTFFNLNETKPRGKFTYDAVYCCNEHECHHRYAELYVIDVNINISCETDGYLTKMTCRWSTSTIQSLAESTLQLRYHRSSLYCSDIPSIHPISEPKDCYLQSDGFYECIFQPIFLLSGYTMWIRINHSLGSLDSPPTCVLPDSVVKPLPPSSVKAEITINIGLLKISWEKPVFPENNLQFQIRYGLSGKEVQWKMYEVYDAKSKSVSLPVPDLCAVYAVQVRCKRLDGLGYWSNWSNPAYTVVMDIKVPMRGPEFWRIINGDTMKKEKNVTLLWKPLMKNDSLCSVQRYVINHHTSCNGTWSEDVGNHTKFTFLWTEQAHTVTVLAINSIGASVANFNLTFSWPMSKVNIVQSLSAYPLNSSCVIVSWILSPSDYKLMYFIIEWKNLNEDGEIKWLRISSSVKKYYIHDHFIPIEKYQFSLYPIFMEGVGKPKIINSFTQDDIEKHQSDAGLYVIVPVIISSSILLLGTLLISHQRMKKLFWEDVPNPKNCSWAQGLNFQKPETFEHLFIKHTASVTCGPLLLEPETISEDISVDTSWKNKDEMMPTTVVSLLSTTDLEKGSVCISDQFNSVNFSEAEGTEVTYEDESQRQPFVKYATLISNSKPSETGEEQGLINSSVTKCFSSKNSPLKDSFSNSSWEIEAQAFFILSDQHPNIISPHLTFSEGLDELLKLEGNFPEENNDKKSIYYLGVTSIKKRESGVLLTDKSRVSCPFPAPCLFTDIRVLQDSCSHFVENNINLGTSSKKTFASYMPQFQTCSTQTHKIMENKMCDLTV

SEQ ID NO: 154 - protein, 221 aa, Homo sapiens
MSDGDYDYLIKFLALGDSGVGKTSVLYQYTDGKFNSKFITTVGIDFREKRVVYRASGPDGATGRGQRIHLQLWDTAGQERFRSLTTAFFRDAMGFLLLFDLTNEQSFLNVRNWISQLQMHAYCENPDIVLCGNKSDLEDQRVVKEEEAIALAEKYGIPYFETSAANGTNISQAIEMLLDLIMKRMERCVDKSWIPEGVVRSNGHASTDQLSEEKEKGACGC

SEQ ID NO: 155 - protein, 2549 aa, Homo sapiens
MLGTGPAAATTAATTSSNVSVLQQFASGLKSRNEETRAKAAKELQHYVTMELREMSQEESTRFYDQLNHHIFELVSSSDANERKGGILAIASLIGVEGGNATRIGRFANYLRNLLPSNDPVVMEMASKAIGRLAMAGDTFTAEYVEFEVKRALEWLGADRNEGRRHAAVLVLRELAISVPTFFFQQVQPFFDNIFVAVWDPKQAIREGAVAALRACLILTTQREPKEMQKPQWYRHTFEEAEKGFDETLAKEKGMNRDDRIHGALLILNELVRISSMEGERLREEMEEITQQQLVHDKYCKDLMGFGTKPRHITPFTSFQAVQPQQSNALVGLLGYSSHQGLMGFGTSPSPAKSTLVESRCCRDLMEEKFDQVCQWVLKCRNSKNSLIQMTILNLLPRLAAFRPSAFTDTQYLQDTMNHVLSCVKKEKERTAAFQALGLLSVAVRSEFKVYLPRVLDIIRAALPPKDFAHKRQKAMQVDATVFTCISMLARAMGPGIQQDIKELLEPMLAVGLSPALTAVLYDLSRQIPQLKKDIQDGLLKMLSLVLMHKPLRHPGMPKGLAHQLASPGLTTLPEASDVGSITLALRTLGSFEFEGHSLTQFVRHCADHFLNSEHKEIRMEAARTCSRLLTPSIHLISGHAHVVSQTAVQVVADVLSKLLVVGITDPDPDIRYCVLASLDERFDAHLAQAENLQALFVALNDQVFEIRELAICTVGRLSSMNPAFVMPFLRKMLIQILTELEHSGIGRIKEQSARMLGHLVSNAPRLIRPYMEPILKALILKLKDPDPDPNPGVINNVLATIGELAQVSGLEMRKWVDELFIIIMDMLQDSSLLAKRQVALWTLGQLVASTGYVVEPYRKYPTLLEVLLNFLKTEQNQGTRREAIRVLGLLGALDPYKHKVNIGMIDQSRDASAVSLSESKSSQDSSDYSTSEMLVNMGNLPLDEFYPAVSMVALMRIFRDQSLSHHHTMVVQAITFIFKSLGLKCVQFLPQVMPTFLNVIRVCDGAIREFLFQQLGMLVSFVKSHIRPYMDEIVTLMREFWVMNTSIQSTIILLIEQIVVALGGEFKLYLPQLIPHMLRVFMHDNSPGRIVSIKLLAAIQLFGANLDDYLHLLLPPIVKLFDAPEAPLPSRKAALETVDRLTESLDFTDYASRIIHPIVRTLDQSPELRSTAMDTLSSLVFQLGKKYQIFIPMVNKVLVRHRINHQRYDVLICRIVKGYTLADEEEDPLIYQHRMLRSGQGDALASGPVETGPMKKLHVSTINLQKAWGAARRVSKDDWLEWLRRLSLELLKDSSSPSLRSCWALAQAYNPMARDLFNAAFVSCWSELNEDQQDELIRSIELALTSQDIAEVTQTLLNLAEFMEHSDKGPLPLRDDNGIVLLGERAAKCRAYAKALHYKELEFQKGPTPAILESLISINNKLQQPEAAAGVLEYAMKHFGELEIQATWYEKLHEWEDALVAYDKKMDTNKDDPELMLGRMRCLEALGEWGQLHQQCCEKWTLVNDETQAKMARMAAAAAWGLGQWDSMEEYTCMIPRDTHDGAFYRAVLALHQDLFSLAQQCIDKARDLLDAELTAMAGESYSRAYGAMVSCHMLSELEEVIQYKLVPERREIIRQIWWERLQGCQRIVEDWQKILMVRSLVVSPHEDMRTWLKYASLCGKSGRLALAHKTLVLLLGVDPSRQLDHPLPTVHPQVTYAYMKNMWKSARKIDAFQHMQHFVQTMQQQAQHAIATEDQQHKQELHKLMARCFLKLGEWQLNLQGINESTIPKVLQYYSAATEHDRSWYKAWHAWAVMNFEAVLHYKHQNQARDEKKKLRHASGANITNATTAATTAATATTTASTEGSNSESEAESTENSPTPSPLQKKVTEDLSKTLLMYTVPAVQGFFRSISLSRGNNLQDTLRVLTLWFDYGHWPDVNEALVEGVKAIQIDTWLQVIPQLIARIDTPRPLVGRLIHQLLTDIGRYHPQALIYPLTVASKSTTTARHNAANKILKNMCEHSNTLVQQAMMVSEELIRVAILWHEMWHEGLEEASRLYFGERNVKGMFEVLEPLHAMMERGPQTLKETSFNQAYGRDLMEAQEWCRKYMKSGNVKDLTQAWDLYYHVFRRISKQLPQLTSLELQYVSPKLLMCRDLELAVPGTYDPNQPIIRIQSIAPSLQVITSKQRPRKLTLMGSNGHEFVFLLKGHEDLRQDERVMQLFGLVNTLLANDPTSLRKNLSIQRYAVIPLSTNSGLIGWVPHCDTLHALIRDYREKKKILLNIEHRIMLRMAPDYDHLTLMQKVEVFEHAVNNTAGDDLAKLLWLKSPSSEVWFDRRTNYTRSLAVMSMVGYILGLGDRHPSNLMLDRLSGKILHIDFGDCFEVAMTREKFPEKIPFRLTRMLTNAMEVTGLDGNYRITCHTVMEVLREHKDSVMAVLEAFVYDPLLNWRLMDTNTKGNKRSRTRTDSYSAGQSVEILDGVELGEPAHKKTGTTVPESIHSFIGDGLVKPEALNKKAIQIINRVRDKLTGRDFSHDDTLDVPTQVELLIKQATSHENLCQCYIGWCPFW

SEQ ID NO: 156 - protein, 410 aa, Homo sapiens
MAKDAGLIEANGELKVFIDQNLSPGKGVVSLVAVHPSTVNPLGKQLLPKTFGQSNVNIAQQVVIGTPQRPAASNTLVVGSPHTPSTHFASQNQPSDSSPWSAGKRNRKGEKNGKGLRHFSMKVCEKVQRKGTTSYNEVADELVAEFSAADNHILPNESAYDQKNIRRRVYDALNVLMAMNIISKEKKEIKWIGLPTNSAQECQNLEVERQRRLERIKQKQSQLQELILQQIAFKNLVQRNRHAEQQASRPPPPNSVIHLPFIIVNTSKKTVIDCSISNDKFEYLFNFDNTFEIHDDIEVLKRMGMACGLESGSCSAEDLKMARSLVPKALEPYVTEMAQGTVGGVFITTAGSTSNGTRFSASDLTNGADGMLATSSNGSQYSGSRVETPVSYVGEDDEEDDDFNENDEDD

SEQ ID NO: 157 - protein, 340 aa, Homo sapiens
MGPPHSGPGGVRVGALLLLGVLGLVSGLSLEPVYWNSANKRFQAEGGYVLYPQIGDRLDLLCPRARPPGPHSSPNYEFYKLYLVGGAQGRRCEAPPAPNLLLTCDRPDLDLRFTIKFQEYSPNLWGHEFRSHHDYYIIATSDGTREGLESLQGGVCLTRGMKVLLRVGQSPRGGAVPRKPVSEMPMERDRGAAHSLEPGKENLPGDPTSNATSRGAEGPLPPPSMPAVAGAAGGLALLLLGVAGAGGAMCWRRRRAKPSESRHPGPGSFGRGGSLGLGGGGGMGPREAEPGELGIALRGGGAADPPFCPHYEKVSGDYGHPVYIVQDGPPQSPPNIYYKV

SEQ ID NO: 158 - protein, 1030 aa, Homo sapiens
MRSEALLLYFTLLHFAGAGFPEDSEPISISHGNYTKQYPVFVGHKPGRNTTQRHRLDIQMIMIMNGTLYIAARDHIYTVDIDTSHTEEIYCSKKLTWKSRQADVDTCRMKGKHKDECHNFIKVLLKKNDDALFVCGTNAFNPSCRNYKMDTLEPFGDEFSGMARCPYDAKHANVALFADGKLYSATVTDFLAIDAVIYRSLGESPTLRTVKHDSKWLKEPYFVQAVDYGDYIYFFFREIAVEYNTMGKVVFPRVAQVCKNDMGGSQRVLEKQWTSFLKARLNCSVPGDSHFYFNILQAVTDVIRINGRDVVLATFSTPYNSIPGSAVCAYDMLDIASVFTGRFKEQKSPDSTWTPVPDERVPKPRPGCCAGSSSLERYATSNEFPDDTLNFIKTHPLMDEAVPSIFNRPWFLRTMVRYRLTKIAVDTAAGPYQNHTVVFLGSEKGIILKFLARIGNSGFLNDSLFLEEMSVYNSEKCSYDGVEDKRIMGMQLDRASSSLYVAFSTCVIKVPLGRCERHGKCKKTCIASRDPYCGWIKEGGACSHLSPNSRLTFEQDIERGNTDGLGDCHNSFVALNGHSSSLLPSTTTSDSTAQEGYESRGGMLDWKHLLDSPDSTDPLGAVSSHNHQDKKGVIRESYLKGHDQLVPVTLLAIAVILAFVMGAVFSGITVYCVCDHRRKDVAVVQRKEKELTHSRRGSMSSVTKLSGLFGDTQSKDPKPEAILTPLMHNGKLATPGNTAKMLIKADQHHLDLTALPTPESTPTLQQKRKPSRGSREWERNQNLINACTKDMPPMGSPVIPTDLPLRASPSHIPSVVVLPITQQGYQHEYVDQPKMSEVAQMALEDQAATLEYKTIKEHLSSKSPNHGVNLVENLDSLPPKVPQREASLGPPGASLSQTGLSKRLEMHHSSSYGVDYKRSYPTNSLTRSHQATTLKRNNTNSSNSSHLSRNQSFGRGDNPPPAPQRVDSIQVHSSQPSGQAVTVSRQPSLNAYNSLTRSGLKRTPSLKPDVPPKPSFAPLSTSMKPNDACT

SEQ ID NO: 159 - protein, 431 aa, Homo sapiens
MQKATYYDNAAAALFGGYSSYPGSNGFGFDVPPQPPFQAATHLEGDYQRSACSLQSLGNAAPHAKSKELNGSCMRPGLAPETLSAPPGSPPPSAAPTSATSNSSNGGGPSKSGPPKCGPGTNSTLTKQIFPWMKESRQTSKLKNNSPGTAEGCGGGGGGGGGGGSGGSGGGGGGGGGGDKSPPGSAASKRARTAYTSAQLVELEKEFHFNRYLCRPRRVEMANLLNLSERQIKIWFQNRRMKYKKDQKAKGLASSSGGPSPAGSPPQPMQSTAGFMNALHSMTPSYESPSPPAFGKAHQNAYALPSNYQPPLKGCGAPQKYPPTPAPEYEPHVLQANGGAYGTPTMQGSPVYVGGGGYADPLPPPAGPSLYGLNHLSHHPSGNLDYNGAPPMAPSQHHGPCEPHPTYTDLSSHHAPPPQGRIQEAPKLTHL

SEQ ID NO: 160 - protein, 467 aa, Homo sapiens
MSSILPFTPPVVKRLLGWKKSAGGSGGAGGGEQNGQEEKWCEKAVKSLVKKLKKTGRLDELEKAITTQNCNTKCVTIPSTCSEIWGLSTPNTIDQWDTTGLYSFSEQTRSLDGRLQVSHRKGLPHVIYCRLWRWPDLHSHHELKAIENCEYAFNLKKDEVCVNPYHYQRVETPVLPPVLVPRHTEILTELPPLDDYTHSIPENTNFPAGIEPQSNYIPETPPPGYISEDGETSDQQLNQSMDTGSPAELSPTTLSPVNHSLDLQPVTYSEPAFWCSIAYYELNQRVGETFHASQPSLTVDGFTDPSNSERFCLGLLSNVNRNATVEMTRRHIGRGVRLYYIGGEVFAECLSDSAIFVQSPNCNQRYGWHPATVCKIPPGCNLKIFNNQEFAALLAQSVNQGFEAVYQLTRMCTIRMSFVKGWGAEYRRQTVTSTPCWIELHLNGPLQWLDKVLTQMGSPSVRCSSMS

SEQ ID NO: 161 - protein, 522 aa, Homo sapiens
MASGGGGCSASERLPPPFPGLEPESEGAAGGSEPEAGDSDTEGEDIFTGAAVVSKHQSPKITTSLLPINNGSKENGIHEEQDQEPQDLFADATVELSLDSTQNNQKKVLAKTLISLPPQEATNSSKPQPTYEELEEEEQEDQFDLTVGITDPEKIGDGMNAYVAYKVTTQTSLPLFRSKQFAVKRRFSDFLGLYEKLSEKHSQNGFIVPPPPEKSLIGMTKVKVGKEDSSSAEFLEKRRAALERYLQRIVNHPTMLQDPDVREFLEKEELPRAVGTQTLSGAGLLKMFNKATDAVSKMTIKMNESDIWFEEKLQEVECEEQRLRKLHAVVETLVNHRKELALNTAQFAKSLAMLGSSEDNTALSRALSQLAEVEEKIEQLHQEQANNDFFLLAELLSDYIRLLAIVRAAFDQRMKTWQRWQDAQATLQKKREAEARLLWANKPDKLQQAKDEILEWESRVTQYERDFERISTVVRKEVIRFEKEKSKDFKNHVIKYLETLLYSQQQLAKYWEAFLPEAKAIS

SEQ ID NO: 162 - protein, 346 aa, Homo sapiens
MARPGQRWLGKWLVAMVVWALCRLATPLAKNLEPVSWSSLNPKFLSGKGLVIYPKIGDKLDIICPRAEAGRPYEYYKLYLVRPEQAAACSTVLDPNVLVTCNRPEQEIRFTIKFQEFSPNYMGLEFKKHHDYYITSTSNGSLEGLENREGGVCRTRTMKIIMKVGQDPNAVTPEQLTTSRPSKEADNTVKMATQAPGSRGSLGDSDGKHETVNQEEKSGPGASGGSSGDPDGFFNSKVALFAAVGAGCVIFLLIIIFLTVLLLKLRKRHRKHTQQRAAALSLSTLASPKGGSGTAGTEPSDIIIPLRTTENNYCPHYEKVSGDYGHPVYIVQEMPPQSPANIYYKV

SEQ ID NO: 163 - protein, 592 aa, Homo sapiens
MEMQDLTSPHSRLSGSSESPSGPKLGNSHINSNSMTPNGTEVKTEPMSSSETASTTADGSLNNFSGSAIGSSSFSPRPTHQFSPPQIYPSNRPYPHILPTPSSQTMAAYGQTQFTTGMQQATAYATYPQPGQPYGISSYGALWAGIKTEGGLSQSQSPGQTGFLSYGTSFSTPQPGQAPYSYQMQGSSFTTSSGIYTGNNSLTNSSGFNSSQQDYPSYPSFGQGQYAQYYNSSPYPAHYMTSSNTSPTTPSTNATYQLQEPPSGITSQAVTDPTAEYSTIHSPSTPIKDSDSDRLRRGSDGKSRGRGRRNNNPSPPPDSDLERVFIWDLDETIIVFHSLLTGSYANRYGRDPPTSVSLGLRMEEMIFNLADTHLFFNDLEECDQVHIDDVSSDDNGQDLSTYNFGTDGFPAAATSANLCLATGVRGGVDWMRKLAFRYRRVKEIYNTYKNNVGGLLGPAKREAWLQLRAEIEALTDSWLTLALKALSLIHSRTNCVNILVTTTQLIPALAKVLLYGLGIVFPIENIYSATKIGKESCFERIIQRFGRKVVYVVIGDGVEEEQGAKKHAMPFWRISSHSDLMALHHALELEYL

SEQ ID NO: 164 - protein, 146 aa, Homo sapiens
MESDFYLRYYVGHKGKFGHEFLEFEFRPDGKLRYANNSNYKNDVMIRKEAYVHKSVMEELKRIIDDSEITKEDDALWPPPDRVGRQELEIVIGDEHISFTTSKIGSLIDVNQSKDPEGLRVFYYLVQDLKCLVFSLIGLHFKIKPI

SEQ ID NO: 165 - protein, 846 aa, Homo sapiens
MLFTVSCSKMSSIVDRDDSSIFDGLVEEDDKDKAKRVSRNKSEKKRRDQFNVLIKELGSMLPGNARKMDKSTVLQKSIDFLRKHKEITAQSDASEIRQDWKPTFLSNEEFTQLMLEALDGFFLAIMTDGSIIYVSESVTSLLEHLPSDLVDQSIFNFIPEGEHSEVYKILSTHLLESDSLTPEYLKSKNQLEFCCHMLRGTIDPKEPSTYEYVKFIGNFKSLNSVSSSAHNGFEGTIQRTHRPSYEDRVCFVATVRLATPQFIKEMCTVEEPNEEFTSRHSLEWKFLFLDHRAPPIIGYLPFEVLGTSGYDYYHVDDLENLAKCHEHLMQYGKGKSCYYRFLTKGQQWIWLQTHYYITYHQWNSRPEFIVCTHTVVSYAEVRAERRRELGIEESLPETAADKSQDSGSDNRINTVSLKEALERFDHSPTPSASSRSSRKSSHTAVSDPSSTPTKIPTDTSTPPRQHLPAHEKMVQRRSSFSSQSINSQSVGSSLTQPVMSQATNLPIPQGMSQFQFSAQLGAMQHLKDQLEQRTRMIEANIHRQQEELRKIQEQLQMVHGQGLQMFLQQSNPGLNFGSVQLSSGNSSNIQQLAPINMQGQVVPTNQIQSGMNTGHIGTTQHMIQQQTLQSTSTQSQQNVLSGHSQQTSLPSQTQSTLTAPLYNTMVISQPAAGSMVQIPSSMPQNSTQSAAVTTFTQDRQIRFSQGQQLVTKLVTAPVACGAVMVPSTMLMGQVVTAYPTFATQQQQSQTLSVTQQQQQQSSQEQQLTSVQQPSQAQLTQPPQQFLQTSRLLHGNPSTQLILSAAFPLQQSTFPQSHHQQHQSQQQQQLSRHRTDSLPDPSKVQPQ

SEQ ID NO: 166 - protein, 628 aa, Homo sapiens
MAELGELKHMVMSFRVSELQVLLGFAGRNKSGRKHELLAKALHLLKSSCAPSVQMKIKELYRRRFPRKTLGPSDLSLLSLPPGTSPVGSPGPLAPIPPTLLAPGTLLGPKREVDMHPPLPQPVHPDVTMKPLPFYEVYGELIRPTTLASTSSQRFEEAHFTFALTPQQVQQILTSREVLPGAKCDYTIQVQLRFCLCETSCPQEDYFPPNLFVKVNGKLCPLPGYLPPTKNGAEPKRPSRPINITPLARLSATVPNTIVVNWSSEFGRNYSLSVYLVRQLTAGTLLQKLRAKGIRNPDHSRALIKEKLTADPDSEVATTSLRVSLMCPLGKMRLTVPCRALTCAHLQSFDAALYLQMNEKKPTWTCPVCDKKAPYESLIIDGLFMEILSSCSDCDEIQFMEDGSWCPMKPKKEASEVCPPPGYGLDGLQYSPVQGGDPSENKKKVEVIDLTIESSSDEEDLPPTKKHCSVTSAAIPALPGSKGVLTSGHQPSSVLRSPAMGTLGGDFLSSLPLHEYPPAFPLGADIQGLDLFSFLQTESQHYGPSVITSLDEQDALGHFFQYRGTPSHFLGPLAPTLGSSHCSATPAPPPGRVSSIVAPGGALREGHGGPLPSGPSLTGCRSDIISLD

SEQ ID NO: 167 - protein, 574 aa, Homo sapiens
MRDPGAAAPLSSLGLCALVLALLGALSAGAGAQPYHGEKGISVPDHGFCQPISIPLCTDIAYNQTILPNLLGHTNQEDAGLEVHQFYPLVKVQCSPELRFFLCSMYAPVCTVLDQAIPPCRSLCERARQGCEALMNKFGFQWPERLRCENFPVHGAGEICVGQNTSDGSGGPGGGPTAYPTAPYLPDLPFTALPPGASDGRGRPAFPFSCPRQLKVPPYLGYRFLGERDCGAPCEPGRANGLMYFKEEERRFARLWVGVWSVLCCASTLFTVLTYLVDMRRFSYPERPIIFLSGCYFMVAVAHVAGFLLEDRAVCVERFSDDGYRTVAQGTKKEGCTILFMVLYFFGMASSIWWVILSLTWFLAAGMKWGHEAIEANSQYFHLAAWAVPAVKTITILAMGQVDGDLLSGVCYVGLSSVDALRGFVLAPLFVYLFIGTSFLLAGFVSLFRIRTIMKHDGTKTEKLEKLMVRIGVFSVLYTVPATIVLACYFYEQAFREHWERTWLLQTCKSYAVPCPPGHFPPMSPDFTVFMIKYLMTMIVGITTGFWIWSGKTLQSWRRFYHRLSHSSKGETAV

SEQ ID NO: 168 - protein, 1766 aa, Homo sapiens [sequence omitted]

SEQ ID NO: 169 - protein, 400 aa, Homo sapiens
MATLLLLLGVLVVSPDALGSTTAVQTPTSGEPLVSTSEPLSSKMYTTSITSDPKADSTGDQTSALPPSTSINEGSPLWTSIGASTGSPLPEPTTYQEVSIKMSSVPQETPHATSHPAVPITANSLGSHTVTGGTITTNSPETSSRTSGAPVTTAASSLETSRGTSGPPLTMATVSLETSKGTSGPPVTMATDSLETSTGTTGPPVTMTTGSLEPSSGASGPQVSSVKLSTMMSPTTSTNASTVPFRNPDENSRGMLPVAVLVALLAVIVLVALLLLWRRRQKRRTGALVLSRGGKRNGVVDAWAGPAQVPEEGAVTVTVGGSGGDKGSGFPDGEGSSRRPTLTTFFGRRKSRQGSLAMEELKSGSGPSLKGEEEPLVASEDGAVDAPAPDEPEGGDGAAP

SEQ ID NO: 170 - protein, 1139 aa, Homo sapiens
MQTPEVPAERSPRRRSISGTSTSEKPNSMDTANTSPFKVPGFFSKRLKGSIKRTKSQSKLDRNTSFRLPSLRSTDDRSRGLPKLKESRSHESLLSPCSTVECLDLGRGEPVSVKPLHSSILGQDFCFEVTYLSGSKCFSCNSASERDKWMENLRRTVQPNKDNCRRAENVLRLWIIEAKDLAPKKKYFCELCLDDTLFARTTSKTKADNIFWGEHFEFFSLPPLHSITVHIYKDVEKKKKKDKNNYVGLVNIPTASVTGRQFVEKWYPVSTPTPNKGKTGGPSIRIKSRFQTITILPMEQYKEFAEFVTSNYTMLCSVLEPVISVRNKEELACALVHILQSTGRAKDFLTDLVMSEVDRCGEHDVLIFRENTIATKSIEEYLKLVGQQYLHDALGEFIKALYESDENCEVDPSKCSSSELIDHQSNLKMCCELAFCKIINSYCVFPRELKEVFASWKQQCLNRGKQDISERLISASLFLRFLCPAIMSPSLFNLMQEYPDDRTSRTLTLIAKVIQNLANFAKFGNKEEYMAFMNDFLEHEWGGMKRFLLEISNPDTISNTPGFDGYIDLGRELSVLHSLLWEVVSQLDKGENSFLQATVAKLGPLPRVLADITKSLTNPTPIQQQLRRFTEHNSSPNVSGSLSSGLQKIFEDPTDSDLHKLKSPSQDNTDSYFRGKTLLLVQQASSQSMTYSEKDERESSLPNGRSVSLMDLQDTHAAQVEHASVMLDVPIRLTGSQLSITQVASIKQLRETQSTPQSAPQVRRPLHPALNQPGGLQPLSFQNPVYHLNNPIPAMPKASIDSSLENLSTASSRSQSNSEDFKLSGPSNSSMEDFTKRSTQSEDFSRRHTVPDRHIPLALPRQNSTGQAQIRKVDQGGLGARAKAPPSLPHSASLRSTGSMSVVSAALVAEPVQNGSRSRQQSSSSRESPVPKVRAIQRQQTQQVQSPVDSATMSPVERTAAWVLNNGQYEEDVEETEQNLDEAKHAEKYEQEITKLKERLRVSSRRLEEYERRLLVQEQQMQKLLLEYKARLEDSEERLRRQQEEKDSQMKSIISRLMAVEEELKKDHAEMQAVIDAKQKIIDAQEKRIVSLDSANTRLMSALTQVKERYSMQVRNGISPTNPTKLSITENGEFKNSSC

SEQ ID NO: 171 - protein, 3056 aa, Homo sapiens [sequence omitted]

SEQ ID NO: 172 - protein, 787 aa, Homo sapiens
MAAARPARGPELPLLGLLLLLLLGDPGRGAASSGNATGPGPRSAGGSARRSAAVTGPPPPLSHCGRAAPCEPLRYNVCLGSVLPYGATSTLLAGDSDSQEEAHGKLVLWSGLRNAPRCWAVIQPLLCAVYMPKCENDRVELPSRTLCQATRGPCAIVERERGWPDFLRCTPDRFPEGCTNEVQNIKFNSSGQCEVPLVRTDNPKSWYEDVEGCGIQCQNPLFTEAEHQDMHSYIAAFGAVTGLCTLFTLATFVADWRNSNRYPAVILFYVNACFFVGSIGWLAQFMDGARREIVCRADGTMRLGEPTSNETLSCVIIFVIVYYALMAGVVWFVVLTYAWHTSFKALGTTYQPLSGKTSYFHLLTWSLPFVLTVAILAVAQVDGDSVSGICFVGYKNYRYRAGFVLAPIGLVLIVGGYFLIRGVMTLFSIKSNHPGLLSEKAASKINETMLRLGIFGFLAFGFVLITFSCHFYDFFNQAEWERSFRDYVLCQANVTIGLPTKQPIPDCEIKNRPSLLVEKINLFAMFGTGIAMSTWVWTKATLLIWRRTWCRLTGQSDDEPKRIKKSKMIAKAFSKRHELLQNPGQELSFSMHTVSHDGPVAGLAFDLNEPSADVSSAWAQHVTKMVARRGAILPQDISVTPVATPVPPEEQANLWLVEAEISPELQKRLGRKKKRRKRKKEVCPLAPPPELHPPAPAPSTIPRLPQLPRQKCLVAAGAWGAGDSCRQGAWTLVSNPFCPEPSPPQDPFLPSAPAPVAWAHGRRQGLGPIHSRTNLMDTELMDADSDF

SEQ ID NO: 173 - protein, 390 aa, Homo sapiens
MRGDRGRGRGGRFGSRGGPGGGFRPFVPHIPFDFYLCEMAFPRVKPAPDETSFSEALLKRNQDLAPNSAEQASILSLVTKINNVIDNLIVAPGTFEVQIEEVRQVGSYKKGTMTTGHNVADLVVILKILPTLEAVAALGNKVVESLRAQDPSEVLTMLTNETGFEISSSDATVKILITTVPPNLRKLDPELHLDIKVLQSALAAIRHARWFEENASQSTVKVLIRLLKDLRIRFPGFEPLTPWILDLLGHYAVMNNPTRQPLALNVAYRRCLQILAAGLFLPGSVGITDPCESGNFRVHTVMTLEQQDMVCYTAQTLVRILSHGGFRKILGQEGDASYLASEISTWDGVIVTPSEKAYEKPPEKKEGEEEEENTEEPPQGEEEESMETQE

SEQ ID NO: 174 - protein, 414 aa, Homo sapiens
MAMVVSTWRDPQDEVPGSQGSQASQAPPVPGPPPGAPHTPQTPGQGGPASTPAQTAAGGQGGPGGPGSDKQQQQQHIECVVCGDKSSGKHYGQFTCEGCKSFFKRSVRRNLSYTCRANRNCPIDQHHRNQCQYCRLKKCLKVGMRREAVQRGRMPPTQPTHGQFALTNGDPLNCHSYLSGYISLLLRAEPYPTSRFGSQCMQPNNIMGIENICELAARMLFSAVEWARNIPFFPDLQITDQVALLRLTWSELFVLNAAQCSMPLHVAPLLAAAGLHASPMSADRVVAFMDHIRIFQEQVEKLKALHVDSAEYSCLKAIVLFTSDACGLSDVAHVESLQEKSQCALEEYVRSQYPNQPTRFGKLLLRLPSLRTVSSSVIEQLFFVRLVGKTPIETLIRDMLLSGSSFNWPYMAIQ

SEQ ID NO: 175 - protein, 1078 aa, Homo sapiens
MAPRKRGGRGISFIFCCFRNNDHPEITYRLRNDSNFALQTMEPALPMPPVEELDVMFSELVDELDLTDKHREAMFALPAEKKWQIYCSKKKDQEENKGATSWPEFYIDQLNSMAARKSLLALEKEEEEERSKTIESLKTALRTKPMRFVTRFIDLDGLSCILNFLKTMDYETSESRIHTSLIGCIKALMNNSQGRAHVLAHSESINVIAQSLSTENIKTKVAVLEILGAVCLVPGGHKKVLQAMLHYQKYASERTRFQTLINDLDKSTGRYRDEVSLKTAIMSFINAVLSQGAGVESLDFRLHLRYEFLMLGIQPVIDKLREHENSTLDRHLDFFEMLRNEDELEFAKRFELVHIDTKSATQMFELTRKRLTHSEAYPHFMSILHHCLQMPYKRSGNTVQYWLLLDRIIQQIVIQNDKGQDPDSTPLENFNIKNVVRMLVNENEVKQWKEQAEKMRKEHNELQQKLEKKERECDAKTQEKEEMMQTLNKMKEKLEKETTEHKQVKQQVADLTAQLHELSRRAVCASIPGGPSPGAPGGPFPSSVPGSLLPPPPPPPLPGGMLPPPPPPLPPGGPPPPPGPPPLGAIMPPPGAPMGLALKKKSIPQPTNALKSFNWSKLPENKLEGTVWTEIDDTKVFKILDLEDLERTFSAYQRQQDFFVNSNSKQKEADAIDDTLSSKLKVKELSVIDGRRAQNCNILLSRLKLSNDEIKRAILTMDEQEDLPKDMLEQLLKFVPEKSDIDLLEEHKHELDRMAKADRFLFEMSRINHYQQRLQSLYFKKKFAERVAEVKPKVEAIRSGSEEVFRSGALKQLLEVVLAFGNYMNKGQRGNAYGFKISSLNKIADTKSSIDKNITLLHYLITIVENKYPSVLNLNEELRDIPQAAKVNMTELDKEISTLRSGLKAVETELEYQKSQPPQPGDKFVSVVSQFITVASFSFSDVEDLLAEAKDLFTKAVKHFGEEAGKIQPDEFFGIFDQFLQAVSEAKQENENMRKKKEEEERRARMEAQLKEQRERERKMRKAKENSEESGEFDDLVSALRSGEVFDKDLSKLKRNRKRITNQMTDSSRERPITKLNF

SEQ ID NO: 176 - protein, 349 aa, Homo sapiens
MHRNFRKWIFYVFLCFGVLYVKLGALSSVVALGANIICNKIPGLAPRQRAICQSRPDAIIVIGEGAQMGINECQYQFRFGRWNCSALGEKTVFGQELRVGSREAAFTYAITAAGVAHAVTAACSQGNLSNCGCDREKQGYYNQAEGWKWGGCSADVRYGIDFSRRFVDAREIKKNARRLMNLHNNEAGRKVLEDRMQLECKCHGVSGSCTTKTCWTTLPKFREVGHLLKEKYNAAVQVEVVRASRLRQPTFLRIKQLRSYQKPMETDLVYIEKSPNYCEEDAATGSVGTQGRLCNRTSPGADGCDTMCCGRGYNTHQYTKVWQCNCKFHWCCFVKCNTCSERTEVFTCK

SEQ ID NO: 177 - protein, 751 aa, Homo sapiens
MAFRTICVLVGVFICSICVKGSSQPQARVYLTFDELRETKTSEYFSLSHHPLDYRILLMDEDQDRIYVGSKDHILSLNINNISQEALSVFWPASTIKVEECKMAGKDPTHGCGNFVRVIQTFNRTHLYVCGSGAFSPVCTYLNRGRRSEDQVFMIDSKCESGKGRCSFNPNVNTVSVMINEELFSGMYIDFMGTDAAIFRSLTKRNAVRTDQHNSKWLSEPMFVDAHVIPDGTDPNDAKVYFFFKEKLTDNNRSTKQIHSMIARICPNDTGGLRSLVNKWTTFLKARLVCSVTDEDGPETHFDELEDVFLLETDNPRTTLVYGIFTTSSSVFKGSAVCVYHLSDIQTVFNGPFAHKEGPNHQLISYQGRIPYPRPGTCPGGAFTPNMRTTKEFPDDVVTFIRNHPLMYNSIYPIHKRPLIVRIGTDYKYTKIAVDRVNAADGRYHVLFLGTDRGTVQKVVVLPTNNSVSGELILEELEVFKNHAPITTMKISSKKQQLYVSSNEGVSQVSLHRCHIYGTACADCCLARDPYCAWDGHSCSRFYPTGKRRSRRQDVRHGNPLTQCRGFNLKAYRNAAEIVQYGVKNNTTFLECAPKSPQASIKWLLQKDKDRRKEVKLNERIIATSQGLLIRSVQGSDQGLYHCIATENSFKQTIAKINFKVLDSEMVAVVTDKWSPWTWASSVRALPFHPKDIMGAFSHSEMQMINQYCKDTRQQHQQGDESQKMRGDYGKLKALINSRKSRNRRNQLPES

SEQ ID NO: 178 - protein, 2414 aa, Homo sapiens
MAENVVEPGPPSAKRPKLSSPALSASASDGTDFGSLFDLEHDLPDELINSTELGLTNGGDINQLQTSLGMVQDAASKHKQLSELLRSGSSPNLNMGVGGPGQVMASQAQQSSPGLGLINSMVKSPMTQAGLTSPNMGMGTSGPNQGPTQSTGMMNSPVNQPAMGMNTGTNAGMNPGMLAAGNGQGIMPNQVMNGSIGAGRGRQDMQYPNPGMGSAGNLLTEPLQQGSPQMGGQTGLRGPQPLKMGMMNNPNPYGSPYTQNPGQQIGASGLGLQIQTKTVLSNNLSPFAMDKKAVPGGGMPNMGQQPAPQVQQPGLVTPVAQGMGSGAHTADPEKRKLIQQQLVLLLHAHKCQRREQANGEVRQCNLPHCRTMKNVLNHMTHCQSGKSCQVAHCASSRQIISHWKNCTRHDCPVCLPLKNAGDKRNQQPILTGAPVGLGNPSSLGVGQQSAPNLSTVSQIDPSSIERAYAALGLPYQVNQMPTQPQVQAKNQQNQQPGQSPQGMRPMSNMSASPMGVNGGVGVQTPSLLSDSMLHSAINSQNPMMSENASVPSLGPMPTAAQPSTTGIRKQWHEDITQDLRNHLVHKLVQAIFPTPDPAALKDRRMENLVAYARKVEGDMYESANNRAEYYHLLAEKIYKIQKELEEKRRTRLQKQNMLPNAAGMVPVSMNPGPNMGQPQPGMTSNGPLPDPSMIRGSVPNQMMPRITPQSGLNQFGQMSMAQPPIVPRQTPPLQHHGQLAQPGALNPPMGYGPRMQQPSNQGQFLPQTQFPSQGMNVTNIPLAPSSGQAPVSQAQMSSSSCPVNSPIMPPGSQGSHIHCPQLPQPALHQNSPSPVPSRTPTPHHTPPSIGAQQPPATTIPAPVPTPPAMPPGPQSQALHPPPRQTPTPPTTQLPQQVQPSLPAAPSADQPQQQPRSQQSTAASVPTPNAPLLPPQPATPLSQPAVSIEGQVSNPPSTSSTEVNSQAIAEKQPSQEVKMEAKMEVDQPEPADTQPEDISESKVEDCKMESTETEERSTELKTEIKEEEDQPSTSATQSSPAPGQSKKKIFKPEELRQALMPTLEALYRQDPESLPFRQPVDPQLLGIPDYFDIVKSPMDLSTIKRKLDTGQYQEPWQYVDDIWLMFNNAWLYNRKTSRVYKYCSKLSEVFEQEIDPVMQSLGYCCGRKLEFSPQTLCCYGKQLCTIPRDATYYSYQNRYHFCEKCFNEIQGESVSLGDDPSQPQTTINKEQFSKRKNDTLDPELFVECTECGRKMHQICVLHHEIIWPAGFVCDGCLKKSARTRKENKFSAKRLPSTRLGTFLENRVNDFLRRQNHPESGEVTVRVVHASDKTVEVKPGMKARFVDSGEMAESFPYRTKALFAFEEIDGVDLCFFGMHVQEYGSDCPPPNQRRVYISYLDSVHFFRPKCLRTAVYHEILIGYLEYVKKLGYTTGHIWACPPSEGDDYIFHCHPPDQKIPKPKRLQEWYKKMLDKAVSERIVHDYKDIFKQATEDRLTSAKELPYFEGDFWPNVLEESIKELEQEEEERKREENTSNESTDVTKGDSKNAKKKNNKKTSKNKSSLSRGNKKKPGMPNVSNDLSQKLYATMEKHKEVFFVIRLIAGPAANSLPPIVDPDPLIPCDLMDGRDAFLTLARDKHLEFSSLRRAQWSTMCMLVELHTQSQDRFVYTCNECKHHVETRWHCTVCEDYDLCITCYNTKNHDHKMEKLGLGLDDESNNQQAAATQSPGDSRRLSIQRCIQSLVHACQCRNANCSLPSCQKMKRVVQHTKGCKRKTNGGCPICKQLIALCCYHAKHCQENKCPVPFCLNIKQKLRQQQLQHRLQQAQMLRRRMASMQRTGVVGQQQGLPSPTPATPTTPTGQQPTTPQTPQPTSQPQPTPPNSMPPYLPRTQAAGPVSQGKAAGQVTPPTPPQTAQPPLPGPPPTAVEMAMQIQRAAETQRQMAHVQIFQRPIQHQMPPMTPMAPMGMNPPPMTRGPSGHLEPGMGPTGMQQQPPWSQGGLPQPQQLQSGMPRPAMMSVAQHGQPLNMAPQPGLGQVGISPLKPGTVSQQALQNLLRTLRSPSSPLQQQQVLSILHANPQLLAAFIKQRAAKYANSNPQPIPGQPGMPQGQPGLQPPTMPGQQGVHSNPAMQNMNPMQAGVQRAGLPQQQPQQQLQPPMGGMSPQAQQMNMNHNTMPSQFRDILRRQQMMQQQQQQGAGPGIGPGMANHNQFQQPQGVGYPPQPQQRMQHHMQQMQQGNMGQIGQLPQALGAEAGASLQAYQQRLLQQQMGSPVQPNPMSPQQHMLPNQAQSPHLQGQQIPNSLSNQVRSPQPVPSPRPQSQPPHSSPSPRMQPQPSPHHVSPQTSSPHPGLVAAQANPMEQGHFASPDQNSMLSQLASNPGMANLHGASATDLGLSTDNSDLNSNLSQSTLDIH

SEQ ID NO: 179 - protein, 1017 aa, Homo sapiens
MKLLKPTWVNHNGKPIFSVDIHPDGTKFATGGQGQDSGKVVIWNMSPVLQEDDEKDENIPKMLCQMDNHLACVNCVRWSNSGMYLASGGDDKLIMVWKRATYIGPSTVFGSSGKLANVEQWRCVSILRNHSGDVMDVAWSPHDAWLASCSVDNTVVIWNAVKFPEILATLRGHSGLVKGLTWDPVGKYIASQADDRSLKVWRTLDWQLETSITKPFDECGGTTHVLRLSWSPDGHYLVSAHAMNNSGPTAQIIEREGWKTNMDFVGHRKAVTVVKFNPKIFKKKQKNGSSAKPSCPYCCCAVGSKDRSLSVWLTCLKRPLVVIHELFDKSIMDISWTLNGLGILVCSMDGSVAFLDFSQDELGDPLSEEEKSRIHQSTYGKSLAIMTEAQLSTAVIENPEMLKYQRRQQQQQLDQKSAATREMGSATSVAGVVNGESLEDIRKNLLKKQVETRTADGRRRITPLCIAQLDTGDFSTAFFNSIPLSGSLAGTMLSSHSSPQLLPLDSSTPNSFGASKPCTEPVVAASARPAGDSVNKDSMNATSTPAALSPSVLTTPSKIEPMKAFDSRFTERSKATPGAPALTSMTPTAVERLKEQNLVKELRPRDLLESSSDSDEKVPLAKASSLSKRKLELEVETVEKKKKGRPRKDSRLMPVSLSVQSPAALTAEKEAMCLSAPALALKLPIPSPQRAFTLQVSSDPSMYIEVENEVTVVGGVKLSRLKCNREGKEWETVLTSRILTAAGSCDVVCVACEKRMLSVFSTCGRRLLSPILLPSPISTLHCTGSYVMALTAAATLSVWDVHRQVVVVKEESLHSILAGSDMTVSQILLTQHGIPVMNLSDGKAYCFNPSLSTWNLVSDKQDSLAQCADFRSSLPSQDAMLCSGPLAIIQGRTSNSGRQAARLFSVPHVVQQETTLAYLENQVAAALTLQSSHEYRHWLLVYARYLVNEGFEYRLREICKDLLGPVHYSTGSQWESTVVGLRKRELLKELLPVIGQNLRFQRLFTECQEQLDILRDK

SEQ ID NO: 180 - protein, 509 aa, Homo sapiens
MVDGVMILPVLIMIALPSPSMEDEKPKVNPKLYMCVCEGLSCGNEDHCEGQQCFSSLSINDGFHVYQKGCFQVYEQGKMTCKTPPSPGQAVECCQGDWCNRNITAQLPTKGKSFPGTQNFHLEVGLIILSVVFAVCLLACLLGVALRKFKRRNQERLNPRDVEYGTIEGLITTNVGDSTLADLLDHSCTSGSGSGLPFLVQRTVARQITLLECVGKGRYGEVWRGSWQGENVAVKIFSSRDEKSWFRETELYNTVMLRHENILGFIASDMTSRHSSTQLWLITHYHEMGSLYDYLQLTTLDTVSCLRIVLSIASGLAHLHIEIFGTQGKPAIAHRDLKSKNILVKKNGQCCIADLGLAVMHSQSTNQLDVGNNPRVGTKRYMAPEVLDETIQVDCFDSYKRVDIWAFGLVLWEVARRMVSNGIVEDYKPPFYDVVPNDPSFEDMRKVVCVDQQRPNIPNRWFSDPTLTSLAKLMKECWYQNPSARLTALRIKKTLTKIDNSLDKLKTDC

SEQ ID NO: 181 - protein, 1124 aa, Homo sapiens
MDSLASLVLCGVSLLLSGTVEGAMDLILINSLPLVSDAETSLTCIASGWRPHEPITIGRDFEALMNQHQDPLEVTQDVTREWAKKVVWKREKASKINGAYFCEGRVRGEAIRIRTMKMRQQASFLPATLTMTVDKGDNVNISFKKVLIKEEDAVIYKNGSFIHSVPRHEVPDILEVHLPHAQPQDAGVYSARYIGGNLFTSAFTRLIVRRCEAQKWGPECNHLCTACMNNGVCHEDTGECICPPGFMGRTCEKACELHTFGRTCKERCSGQEGCKSYVFCLPDPYGCSCATGWKGLQCNEACHPGFYGPDCKLRCSCNNGEMCDRFQGCLCSPGWQGLQCEREGIPRMTPKIVDLPDHIEVNSGKFNPICKASGWPLPTNEEMTLVKPDGTVLHPKDFNHTDHFSVAIFTIHRILPPDSGVWVCSVNTVAGMVEKPFNISVKVLPKPLNAPNVIDTGHNFAVINISSEPYFGDGPIKSKKLLYKPVNHYEAWQHIQVTNEIVTLNYLEPRTEYELCVQLVRRGEGGEGHPGPVRRFTTASIGLPPPRGLNLLPKSQTTLNLTWQPIFPSSEDDFYVEVERRSVQKSDQQNIKVPGNLTSVLLNNLHPREQYVVRARVNTKAQGEWSEDLTAWTLSDILPPQPENIKISNITHSSAVISWTILDGYSISSITIRYKVQGKNEDQHVDVKIKNATIIQYQLKGLEPETAYQVDIFAENNIGSSNPAFSHELVTLPESQAPADLGGGKMLLIAILGSAGMTCLTVLLAFLIILQLKRANVQRRMAQAFQNVREEPAVQFNSGTLALNRKVKNNPDPTIYPVLDWNDIKFQDVIGEGNFGQVLKARIKKDGLRMDAAIKRMKEYASKDDHRDFAGELEVLCKLGHHPNIINLLGACEHRGYLYLAIEYAPHGNLLDFLRKSRVLETDPAFAIANSTASTLSSQQLLHFAADVARGMDYLSQKQFIHRDLAARNILVGENYVAKIADFGLSRGQEVYVKKTMGRLPVRWMAIESLNYSVYTTNSDVWSYGVLLWEIVSLGGTPYCGMTCAELYEKLPQGYRLEKPLNCDDEVYDLMRQCWREKPYERPSFAQILVSLNRMLEERKTYVNTTLYEKFTYAGIDCSAEEAA

SEQ ID NO: 182 - protein, 206 aa, Homo sapiens
MRRTGAPAQADSRGRGRARGGCPGGEATLSQPPPRGGTRGQEPQMKETIMNQEKLAKLQAQVRIGGKGTARRKKKVVHRTATADDKKLQFSLKKLGVNNISGIEEVNMFTNQGTVIHFNNPKVQASLAANTFTITGHAETKQLTEMLPSILNQLGADSLTSLRRLAEALPKQSVDGKAPLATGEDDDDEVPDLVENFDEASKNEAN

SEQ ID NO: 183 - protein, 998 aa, Homo sapiens
MVFQTRYPSWIILCYIWLLRFAHTGEAQAAKEVLLLDSKAQQTELEWISSPPNGWEEISGLDENYTPIRTYQVCQVMEPNQNNWLRTNWISKGNAQRIFVELKFTLRDCNSLPGVLGTCKETFNLYYYETDYDTGRNVRENLYVKIDTIAADESFTQGDLGERKMKLNTEVREIGPLSKKGFYLAFQDVGACIALVSVKVYYKKCWSIIENLAIFPDTVTGSEFSSLVEVRGTCVSSAEEEAENAPRMHCSAEGEWLVPIGKCICKAGYQQKGDTCEPCGRGFYKSSSQDLQCSRCPTHSFSDKEGSSRCECEDGYYRAPSDPPYVACTRPPSAPQNLIFNINQTTVSLEWSPPADNGGRNDVTYRILCKRCSWEQGECVPCGSNIGYMPQQTGLEDNYVTVMDLLAHANYTFEVEAVNGVSDLSRSQRLFAAVSITTGQAAPSQVSGVMKERVLQRSVELSWQEPEHPNGVITEYEIKYYEKDQRERTYSTVKTKSTSASINNLKPGTVYVFQIRAFTAAGYGNYSPRLDVATLEEATGKMFEATAVSSEQNPVIIIAVVAVAGTIILVFMVFGFIIGRRHCGYSKADQEGDEELYFHFKFPGTKTYIDPETYEDPNRAVHQFAKELDASCIKIERVIGAGEFGEVCSGRLKLPGKRDVAVAIKTLKVGYTEKQRRDFLCEASIMGQFDHPNVVHLEGVVTRGKPVMIVIEFMENGALDAFLRKHDGQFTVIQLVGMLRGIAAGMRYLADMGYVHRDLAARNILVNSNLVCKVSDFGLSRVIEDDPEAVYTTTGGKIPVRWTAPEAIQYRKFTSASDVWSYGIVMWEVMSYGERPYWDMSNQDVIKAIEEGYRLPAPMDCPAGLHQLMLDCWQKERAERPKFEQIVGILDKMIRNPNSLKTPLGTCSRPISPLLDQNTPDFTTFCSVGEWLQAIKMERYKDNFTAAGYNSLESVARMTIEDVMSLGITLVGHQKKIMSSIQTMRAQMLHLHGTGIQV

SEQ ID NO: 184 - protein, 424 aa, Homo sapiens
MGSLVLTLCALFCLAAYLVSGSPIMNLEQSPLEEDMSLFGDVFSEQDGVDFNTLLQSMKDEFLKTLNLSDIPTQDSAKVDPPEYMLELYNKFATDRTSMPSANIIRSFKNEDLFSQPVSFNGLRKYPLLFNVSIPHHEEVIMAELRLYTLVQRDRMIYDGVDRKITIFEVLESKGDNEGERNMLVLVSGEIYGTNSEWETFDVTDAIRRWQKSGSSTHQLEVHIESKHDEAEDASSGRLEIDTSAQNKHNPLLIVFSDDQSSDKERKEELNEMISHEQLPELDNLGLDSFSSGPGEEALLQMRSNIIYDSTARIRRNAKGNYCKRTPLYIDFKEIGWDSWIIAPPGYEAYECRGVCNYPLAEHLTPTKHAIIQALVHLKNSQKASKACCVPTKLEPISILYLDKGVVTYKFKYEGMAVSECGCR

SEQ ID NO: 185 - protein, 233 aa, Homo sapiens
MGSPRSALSCLLLHLLVLCLQAQEGPGRGPALGRELASLFRAGREPQGVSQQHVREQSLVTDQLSRRLIRTYQLYSRTSGKHVQVLANKRINAMAEDGDPFAKLIVETDTFGSRVRVRGAETGLYICMNKKGKLIAKSNGKGKDCVFTEIVLENNYTALQNAKYEGWYMAFTRKGRPRKGSKTRQHQREVHFMKRLPRGHHTTEQSLRFEFLNYPPFTRSLRGSQRTWAPEPR

SEQ ID NO: 186 - protein, 2275 aa, Homo sapiens
MAAERRCGSMRDLRAQVTSGLLPFPEVTLQALGEDEITLESVLRGKFAAGKNGLACLACGPQLEVVNSITGERLSAYRFSGVNEQPPVVLAVKEFSWQKRTGLLIGLEETEGSVLCLYDLGISKVVKAVVLPGRVTAIEPIINHGGASASTQHLHPSLRWLFGVAAVVTDVGQILLVDLCLDDLSCNQNEVEASDLEVLTGIPAEVPHIRESVMRQGRHLCFQLVSPTGTAVSTLSYISRTNQLAVGFSDGYLALWNMKSMKREYYIQLESGQVPVYAVTFQEPENDPRNCCYLWAVQSTQDSEGDVLSLHLLQLAFGNRKCLASGQILYEGLEYCEERYTLDLTGGMFPLRGQTSNTKLLGCQSIEKFRSHGDREEGVNEALSPDTSVSVFTWQVNIYGQGKPSVYLGLFDINRWYHAQMPDSLRSGEYLHNCSYFALWSLESVVSRTSPHGILDILVHERSLNRGVPPSYPPPEQFFNPSTYNFDATCLLNSGVVHLTCTGFQKETLTFLKKSGPSLNELIPDGYNRCLVAGLLSPRFVDVQPSSLSQEEQLEAILSAAIQTSSLGLLTGYIRRWITEEQPNSATNLRFVLEWTWNKVVLTKEEFDRLCVPLFDGSCHFMDPQTIQSIQQCYLLLSNLNIVLSCFASEAREITERGLIDLSNKFVVSHLICQYAQVVLWFSHSGLLPEGIDDSVQLSRLCYNYPVIQNYYTSRRQKFERLSRGKWNPDCLMIDGLVSQLGERIEKLWKRDEGGTGKYPPASLHAVLDMYLLDGVTEAAKHSITIYLLLDIMYSFPNKTDTPIESFPTVFAISWGQVKLIQGFWLIDHNDYESGLDLLFHPATAKPLSWQHSKIIQAFMSQGEHRQALRYIQTMKPTVSSGNDVILHLTVLLFNRCMVEAWNFLRQHCNRLNIEELLKHMYEVCQEMGLMEDLLKLPFTDTEQECLVKFLQSSASVQNHEFLLVHHLQRANYVPALKLNQTLKINVMNDRDPRLRERSLARNSILDQYGKILPRVHRKLAIERAKPYHLSTSSVFRLVSRPKPLSAVPKQVVTGTVLTRSVFINNVLSKIGEVWASKEPINSTTPFNSSKIEEPSPIVYSLPAPELPEAFFGTPISKASQKISRLLDLVVQPVPRPSQCSEFIQQSSMKSPLYLVSRSLPSSSQLKGSPQAISRASELHLLETPLVVKKAKSLAMSVTTSGFSEFTPQSILRSTLRSTPLASPSPSPGRSPQRLKETRISFVEEDVHPKWIPGAADDSKLEVFTTPKKCAVPVETEWLKSKDRTTSFFLNSPEKEHQEMDEGSQSLEKLDVSKGNSSVSITSDETTLEYQDAPSPEDLEETVFTASKPKSSSTALTTNVTEQTEKDGDKDVFASEVTPSDLQKQMGNLEDAETKDLLVAAEAFSELNHLSPVQGTEASLCAPSVYEGKIFTQKSKVPVLDEGLTSVETYTPAIRANDNKSMADVLGDGGNSSLTISEGPIVSERRLNQEVALNLKEDHEVEVGVLKESVDLPEEKLPISDSPPDTQEIHVIEQEKLEAQDSGEEARNLSFNELYPSGTLKLQYNFDTIDQQFCDLADNKDTAECDIAEVDGELFVAQSNFTLILEGEEGEVEPGDFASSDVLPKAANTATEEKLVCSGENDNHGQIANLPSAVTSDQKSQKVDTLPYVPEPIKVAIAENLLDVIKDTRSKEITSDTMEQSIHETIPLVSQNIMCPTKLVKSAFKTAQETSTMTMNVSQVDDVVSSKTRTRGQRIQNVNVKSAQQEASADVATPKMPGQSVRKKTRKAKEISEASENIYSDVRGLSQNQQIPQNSVTPRRGRRKKEVNQDILENTSSVEQELQITTGRESKRLKSSQLLEPAVEETTKKEVKVSSVTKRTPRRIKRSVENQESVEIINDLKVSTVTSPSRMIRKLRSTNLDASENTGNKQDDKSSDKQLRIKHVRRVRGREVSPSDVREDSNLESSQLTVQAEFDMSAIPRKRGRPRKINPSEDVGSKAVKEERSPKKKEAPSIRRRSTRNTPAKSENVDVGKPALGKSILVPNEELSMVMSSKKKLTKKTESQSQKRSLHSVSEERTDEMTHKETNEQEERLLATASFTKSSRSSRTRSSKAILLPDLSEPNNEPLFSPASEVPRKAKAKKIEVPAQLKELVSDLSSQFVISPPALRSRQKNTSNKNKLEDELKDDAQSVETLGKPKAKRIRTSKTKQASKNTEKESAWSPPPIEIRLISPLASPADGVKSKPRKTTEVTGTGLGRNRKKLSSYPKQILRRKML

SEQ ID NO: 187 - protein, 986 aa, Homo sapiens
MPGVARLPLLLGLLLLPRPGRPLDLADYTYDLAEEDDSEPLNYKDPCKAAAFLGDIALDEEDLRAFQVQQAVDLRRHTARKSSIKAAVPGNTSTPSCQSTNGQPQRGACGRWRGRSRSRRAATSRPERVWPDGVIPFVIGGNFTGSQRAVFRQAMRHWEKHTCVTFLERTDEDSYIVFTYRPCGCCSYVGRRGGGPQAISIGKNCDKFGIVVHELGHVVGFWHEHTRPDRDRHVSIVRENIQPGQEYNFLKMEPQEVESLGETYDFDSIMHYARNTFSRGIFLDTIVPKYEVNGVKPPIGQRTRLSKGDIAQARKLYKCPACGETLQDSTGNFSSPEYPNGYSAHMHCVWRISVTPGEKIILNFTSLDLYRSRLCWYDYVEVRDGFWRKAPLRGRFCGSKLPEPIVSTDSRLWVEFRSSSNWVGKGFFAVYEAICGGDVKKDYGHIQSPNYPDDYRPSKVCIWRIQVSEGFHVGLTFQSFEIERHDSCAYDYLEVRDGHSESSTLIGRYCGYEKPDDIKSTSSRLWLKFVSDGSINKAGFAVNFFKEVDECSRPNRGGCEQRCLNTLGSYKCSCDPGYELAPDKRRCEAACGGFLTKLNGSITSPGWPKEYPPNKNCIWQLVAPTQYRISLQFDFFETEGNDVCKYDFVEVRSGLTADSKLHGKFCGSEKPEVITSQYNNMRVEFKSDNTVSKKGFKAHFFSDKDECSKDNGGCQQDCVNTFGSYECQCRSGFVLHDNKHDCKEAGCDHKVTSTSGTITSPNWPDKYPSKKECTWAISSTPGHRVKLTFMEMDIESQPECAYDHLEVFDGRDAKAPVLGRFCGSKKPEPVLATGSRMFLRFYSDNSVQRKGFQASHATECGGQVRADVKTKDLYSHAQFGDNNYPGGVDCEWVIVAEEGYGVELVFQTFEVEEETDCGYDYMELFDGYDSTAPRLGRYCGSGPPEEVYSAGDSVLVKFHSDDTITKKGFHLRYTSTKFQDTLHSRK

SEQ ID NO: 188 - protein, 1452 aa, Homo sapiens [sequence omitted]

SEQ ID NO: 189 - protein, 4377 aa, Homo sapiens
MAHAASQLKKNRDLEINAEEEPEKKRKHRKRSRDRKKKSDANASYLRAARAGHLEKALDYIKNGVDINICNQNGLNALHLASKEGHVEVVSELLQREANVDAATKKGNTALHIASLAGQAEVVKVLVTNGANVNAQSQNGFTPLYMAAQENHLEVVKFLLDNGASQSLATEDGFTPLAVALQQGHDQVVSLLLENDTKGKVRLPALHIAARKDDTKAAALLLQNDNNADVESKSGFTPLHIAAHYGNINVATLLLNRAAAVDFTARNDITPLHVASKRGNANMVKLLLDRGAKIDAKTRDGLTPLHCGARSGHEQVVEMLLDRAAPILSKTKNGLSPLHMATQGDHLNCVQLLLQHNVPVDDVTNDYLTALHVAAHCGHYKVAKVLLDKKANPNAKALNGFTPLHIACKKNRIKVMELLLKHGASIQAVTESGLTPIHVAAFMGHVNIVSQLMHHGASPNTTNVRGETALHMAARSGQAEVVRYLVQDGAQVEAKAKDDQTPLHISARLGKADIVQQLLQQGASPNAATTSGYTPLHLSAREGHEDVAAFLLDHGASLSITTKKGFTPLHVAAKYGKLEVANLLLQKSASPDAAGKSGLTPLHVAAHYDNQKVALLLLDQGASPHAAAKNGYTPLHIAAKKNQMDIATTLLEYGADANAVTRQGIASVHLAAQEGHVDMVSLLLGRNANVNLSNKSGLTPLHLAAQEDRVNVAEVLVNQGAHVDAQTKMGYTPLHVGCHYGNIKIVNFLLQHSAKVNAKTKNGYTPLHQAAQQGHTHIINVLLQNNASPNELTVNGNTALGIARRLGYISVVDTLKIVTEETMTTTTVTEKHKMNVPETMNEVLDMSDDEVRKANAPEMLSDGEYISDVEEGEDAMTGDTDKYLGPQDLKELGDDSLPAEGYMGFSLGARSASLRSFSSDRSYTLNRSSYARDSMMIEELLVPSKEQHLTFTREFDSDSLRHYSWAADTLDNVNLVSSPIHSGFLVSFMVDARGGSMRGSRHHGMRIIIPPRKCTAPTRITCRLVKRHKLANPPPHGERRGISSRLVEMGPAGAQFLGPVIVEIPHFGSMRGKERELIVLRSENGETWKEHQFDSKNEDLTELLNGMDEELDSPEELGKKRICRIITKDFPQYFAVVSRIKQESNQIGPEGGILSSTTVPLVQASFPEGALTKRIRVGLQAQPVPDEIVKKILGNKATFSPIVTVEPRRRKFHKPITMTIPVPPPSGEGVSNGYKGDTTPNLRLLCSITGGTSPAQWEDITGTTPLTFIKDCVSFTTNVSARFWLADCHQVLETVGLATQLYRELICVPYMAKFVVFAKMNDPVESSLRCFCMTDDKVDKTLEQQENFEEVARSKDIEVLEGKPIYVDCYGNLAPLTKGGQQLVFNFYSFKENRLPFSIKIRDTSQEPCGRLSFLKERKTTKGLPQTAVCNLNITLPAHKKETESDQDDEIEKTDRRQSFASLALRKRYSYLTEPGMIERSTGATRSLPTTYSYKPFFSTRPYQSWTTAPITVPGPAKSGFTSLSSSSSNTPSASPLKSIWSVSTPSPIKSTLGASTTSSVKSISDVASPIRSLRTMSSPIKTVVSQSPYNIQVSSGTLARAPAVTEATPLKGLASNSTFSSRTSPVTTAGSLLERSSITMTPPASPKSNINMYSSSLPFKSIITSAAPLISSPLKSVVSPVKSRVDVISSAKITMASSLSSPVKQMPGHAEVALVNGSISPLKYASSSTLINGCKATATLQEKISSATNSVSSVVSAATDTVEKVFSTTTAMPFSPLRSYVSAAPSAFQSLRTPSASALYTSLGSSISATTSSVTSSIITVPVYSVVNVLPEPALKKLPDSNSFTKSAAALLSPIKTLTTETHPQPHFSRTSSPVKSSLFLAPSALKLSTPSSLSSSQEILKDVAEMKEDLMRMTAILQTDVPEEKPFQPELPKEGRIDDEEPFKIVEKVKEDLVKVSEILKKDVCVDNKGSPKSPKSDKGHSPEDDWIEFSSEEIREARQQAAASQSPSLPERVQVKAKAASEKDYNLTKVIDYLTNDIGSSSLTNLKYKFEDAKKDGEGGQKRVLKPAIALQEHKLKMPPASMRTSTSEKELCKMADSFFGTDTILESPDDFSQHDQDKSPLSDSGFETRSEKTPSAPQSAETTGPKPLFHEVPIPPVITETRTEVVHVIRSYDPSAGDVPQTQPEEPVSPKPSPTFMELEPKPTTSSIKEKVKAFQMKASSEEDDHNRVLSKGMRVKEETHITTTTRMVYHSPPGGEGASERIEETMSVHDIMKAFQSGRDPSKELAGLFEHKSAVSPDVHKSAAETSAQHAEKDNQMKPKLERIIEVHIEKGNQAEPTEVIIRETKKHPEKEMYVYQKDLSRGDINLKDFLPEKHDAFPCSEEQGQQEEEELTAEESLPSYLESSRVNTPVSQEEDSRPSSAQLISDDSYKTLKLLSQHSIEYHDDELSELRGESYRFAEKMLLSEKLDVSHSDTEESVTDHAGPPSSELQGSDKRSREKIATAPKKEILSKIYKDVSENGVGKVSKDEHFDKVTVLHYSGNVSSPKHAMWMRFTEDRLDRGREKLIYEDRVDRTVKEAEEKLTEVSQFFRDKTEKLNDELQSPEKKARPKNGKEYSSQSPTSSSPEKVLLTELLASNDEWVKARQHGPDGQGFPKAEEKAPSLPSSPEKMVLSQQTEDSKSTVEAKGSISQSKAPDGPQSGFQLKQSKLSSIRLKFEQGTHAKSKDMSQEDRKSDGQSRIPVKKIQESKLPVYQVFAREKQQKAIDLPDESVSVQKDFMVLKTKDEHAQSNEIVVNDSGSDNVKKQRTEMSSKAMPDSFSEQQAKDLACHITSDLATRGPWDKKVFRTWESSGATNNKSQKEKLSHVLVHDVRENHIGHPESKSVDQKNEFMSVTERERKLLTNGSLSEIKEMTVKSPSKKVLYREYVVKEGDHPGGLLDQPSRRSESSAVSHIPVRVADERRMLSSNIPDGFCEQSAFPKHELSQKLSQSSMSKETVETQHFNSIEDEKVTYSEISKVSKHQSYVGLCPPLEETETSPTKSPDSLEFSPGKESPSSDVFDHSPIDGLEKLAPLAQTEGGKEIKTLPVYVSFVQVGKQYEKEIQQGGVKKIISQECKTVQETRGTFYTTRQQKQPPSPQGSPEDDTLEQVSFLDSSGKSPLTPETPSSEEVSYEFTSKTPDSLIAYIPGKPSPIPEVSEESEEEEQAKSTSLKQTTVEETAVEREMPNDVSKDSNQRPKNNRVAYIEFPPPPPLDADQIESDKKHHYLPEKEVDMIEVNLQDEHDKYQLAEPVIRVQPPSPVPPGADVSDSSDDESIYQPVPVKKYTFKLKEVDDEQKEKPKASAEKASNQKELESNGSGKDNEFGLGLDSPQNEIAQNGNNDQSITECSIATTAEFSHDTDATEIDSLDGYDLQDEDDGLTESDSKLPIQAMEIKKDIWNTEGILKPADRSFSQSKLEVIEEEGKVGPDEDKPPSKSSSSEKTPDKTDQKSGAQFFTLEGRHPDRSVFPDTYFSYKVDEEFATPFKTVATKGLDFDPWSNNRGDDEVFDSKSREDETKPFGLAVEDRSPATTPDTTPARTPTDESTPTSEPNPFPFHEGKMFEMTRSGAIDMSKRDFVEERLQFFQIGEHTSEGKSGDQGEGDKSMVTATPQPQSGDTTVETNLERNVETPTVEPNPSIPTSGECQEGTSSSGSLEKSAAATNTSKVDPKLRTPIKMGISASTMTMKKEGPGEITDKIEAVMTSCQGLENETITMISNTANSQMGVRPHEKHDFQKDNFNNNNNLDSSTIQTDNIMSNIVLTEHSAPTCTTEKDNPVKVSSGKKTGVLQGHCVRDKQKVLGEQQKTKELIGIRQKSKLPIKATSPKDTFPPNHMSNTKASKMKQVSQSEKTKALTTSSCVDVKSRIPVKNTPRDNIIAVRKACATQKQGQPEKGKAKQLPSKLPVKVRSTCVTTTTTTATTTTTTTTTTTTSCTVKVRKSQLKEVCKHSIEYFKGISGETLKLVDRLSEEEKKMQSELSDEEESTSRNTSLSETSRGGQPSVTTKSARDKKTEAAPLKSKSEKAGSEKRSSRRTGPQSPCERTDIRMAIVADHLGLSWTELARELNFSVDEINQIRVENPNSLISQSFMLLKKWVTRDGKNATTDALTSVLTKINRIDIVTLLEGPIFDYGNISGTRSFADENNVFHDPVDGWQNETSSGNLESCAQARRVTGGLLDRLDDSPDQCRDSITSYLKGEAGKFEANGSHTEITPEAKTKSYFPESQNDVGKQSTKETLKPKIHGSGHVEEPASPLAAYQKSLEETSKLIIEETKPCVPVSMKKMSRTSPADGKPRLSLHEEEGSSGSEQKQGEGFKVKTKKEIRHVEKKSHS

SEQ ID NO: 190 - protein, 342 aa, Homo sapiens
MSRQAKDDFLRHYTVSDPRTHPKGYTEYKVTAQFISKKDPEDVKEVVVWKRYSDFRKLHGDLAYTHRNLFRRLEEFPAFPRAQVFGRFEASVIEERRKGAEDLLRFTVHIPALNNSPQLKEFFRGGEVTRPLEVSRDLHILPPPLIPTPPPDDPRLSQLLPAERRGLEELEVPVDPPPSSPAQEALDLLFNCESTEEASGSPARGPLTEAELALFDPFSKEEGAAPSPTHVAELATMEVESARLDQEPWEPGGQEEEEDGEGGPTPAYLSQATELITQALRDEKAGAYAAALQGYRDGVHVLLQGVPSDPLPARQEGVKKKAAEYLKRAEEILRLHLSQLPP

SEQ ID NO: 191 - protein, 1617 aa, Homo sapiens
MNMKQKSVYQQTKALLCKNFLKKWRMKRESLLEWGLSILLGLCIALFSSSMRNVQFPGMAPQNLGRVDKFNSSSLMVVYTPISNLTQQIMNKTALAPLLKGTSVIGAPNKTHMDEILLENLPYAMGIIFNETFSYKLIFFQGYNSPLWKEDFSAHCWDGYGEFSCTLTKYWNRGFVALQTAINTAIIEITTNHPVMEELMSVTAITMKTLPFITKNLLHNEMFILFFLLHFSPLVYFISLNVTKERKKSKNLMKMMGLQDSAFWLSWGLIYAGFIFIISIFVTIIITFTQIIVMTGFMVIFILFFLYGLSLVALVFLMSVLLKKAVLTNLVVFLLTLFWGCLGFTVFYEQLPSSLEWILNICSPFAFTTGMIQIIKLDYNLNGVIFPDPSGDSYTMIATFSMLLLDGLIYLLLALYFDKILPYGDERHYSPLFFLNSSSCFQHQRTNAKVIEKEIDAEHPSDDYFEPVAPEFQGKEAIRIRNVKKEYKGKSGKVEALKGLLFDIYEGQITAILGHSGAGKSSLLNILNGLSVPTEGSVTIYNKNLSEMQDLEEIRKITGVCPQFNVQFDILTVKENLSLFAKIKGIHLKEVEQEVQRILLELDMQNIQDNLAKHLSEGQKRKLTFGITILGDPQILLLDEPTTGLDPFSRDQVWSLLRERRADHVILFSTQSMDEADILADRKVIMSNGRLKCAGSSMFLKRRWGLGYHLSLHRNEICNPEQITSFITHHIPDAKLKTENKEKLVYTLPLERTNTFPDLFSDLDKCSDQGVTGYDISMSTLNEVFMKLEGQSTIEQDFEQVEMIRDSESLNEMELAHSSFSEMQTAVSDMGLWRMQVFAMARLRFLKLKRQTKVLLTLLLVFGIAIFPLIVENIMYAMLNEKIDWEFKNELYFLSPGQLPQEPRTSLLIINNTESNIEDFIKSLKHQNILLEVDDFENRNGTDGLSYNGAIIVSGKQKDYRFSVVCNTKRLHCFPILMNIISNGLLQMFNHTQHIRIESSPFPLSHIGLWTGLPDGSFFLFLVLCSISPYITMGSISDYKKNAKSQLWISGLYTSAYWCGQALVDVSFFILILLLMYLIFYIENMQYLLITSQIVFALVIVTPGYAASLVFFIYMISFIFRKRRKNSGLWSFYFFFASTIMFSITLINHFDLSILITTMVLVPSYTLLGFKTFLEVRDQEHYREFPEANFELSATDFLVCFIPYFQTLLFVFVLRCMELKCGKKRMRKDPVFRISPQSRDAKPNPEEPIDEDEDIQTERIRTATALTTSILDEKPVIIASCLHKEYAGQKKSCFSKRKKKIAARNISFCVQEGEILGLLGPNGAGKSSSIRMISGITKPTAGEVELKGCSSVLGHLGYCPQENVLWPMLTLREHLEVYAAVKGLRKADARLAIARLVSAFKLHEQLNVPVQKLTAGITRKLCFVLSLLGNSPVLLLDEPSTGIDPTGQQQMWQAIQAVVKNTERGVLLTTHNLAEAEALCDRVAIMVSGRLRCIGSIQHLKNKLGKDYILELKVKETSQVTLVHTEILKLFPQAAGQERYSSLLTYKLPVADVYPLSQTFHKLEAVKHNFNLEEYSLSQCTLEKVFLELSKEQEVGNFDEEIDTTMRWKLLPHSDEP

SEQ ID NO: 192 - protein, 743 aa, Homo sapiens
EVMNLMEQPIKVTEWQQTYTYDSGIHSGANTCVPSVSSKGIMEEDEACGRQYTLKKTTTYTQGVPPSQGDLEYQMSTTARAKRVREAMCPGVSGEGQLALLATQVEGQATNLQRLAEPSQLLKSAIVHLINYQDDAELVTRALPELTKLLNDEDPVVVTKAAMIVNQLSKKEASRRALMGSPQLVAAVVRTMQNTSDLDTARCTTSILHNLSHHREGLLAIFKSGGIPALVRMLSSPVESVLFYAITTLHNLLLYQEGAKMACAGRRAQKMVPLLNKNNPKFLAITTDCLQLLAYGNQESKLIILANGGPQALVQIMRNYSYEKLLWTTSRVLKVLSVCPSNKPAIVEAGGMQALGKHLTSNSPRLVQNCLWTLRNLSDVATKQEGLESVLKILVNQLSVDDVNVLTCATGTLSNLTCNNSKNKTLVTQNSGVEALIHAILRAGDKDDITEPAVCALRHLTSRHPEAEMAQNSVRLNYGIPAIVKLLNQPNQWPLVKATIGLIRNLALCPANHAPLQEAAVIPRLVQLLVKAHQDAQRHVAAGTQQPYTDGVRMEEIVEGCTGALHILARDPMNRMEIFRLNTIPLFVQLLYSSVENIQRVAAGVLCELAQDKEAADAIDAEGASAPLMELLHSRNEGTATYAAAVLFRISEDKNPDYRKRVSVELTNSLFKHDPAAWEAAQSMIPINEPYGDDMDATYRPMYSSDVPLDPLEMHMDMDGDYPIDTYSDGLRPPYPTADHMLA

SEQ ID NO: 193 - protein, 398 aa, Homo sapiens
MALLRRPTVSSDLENIDTGVNSKVKSHVTIRRTVLEEIGNRVTTRAAQVAKKAQNTKVPVQPTKTTNVNKQLKPTASVKPVQMEKLAPKGPSPTPEDVSMKEENLCQAFSDALLCKIEDIDNEDWENPQLCSDYVKDIYQYLRQLEVLQSINPHFLDGRDINGRMRAILVDWLVQVHSKFRLLQETLYMCVGIMDRFLQVQPVSRKKLQLVGITALLLASKYEEMFSPNIEDFVYITDNAYTSSQIREMETLILKELKFELGRPLPLHFLRRASKAGEVDVEQHTLAKYLMELTLIDYDMVHYHPSKVAAAASCLSQKVLGQGKWNLKQQYYTGYTENEVLEVMQHMAKNVVKVNENLTKFIAIKNKYASSKLLKISMIPQLNSKAVKDLASPLIGRS

SEQ ID NO: 194 - protein, 1218 aa, Homo sapiens
MRSPRTRGRSGRPLSLLLALLCALRAKVCGASGQFELEILSMQNVNGELQNGNCCGGARNPGDRKCTRDECDTYFKVCLKEYQSRVTAGGPCSFGSGSTPVIGGNTFNLKASRGNDRNRIVLPFSFAWPRSYTLLVEAWDSSNDTVQPDSIIEKASHSGMINPSRQWQTLKQNTGVAHFEYQIRVTCDDYYYGFGCNKFCRPRDDFFGHYACDQNGNKTCMEGWMGPECNRAICRQGCSPKHGSCKLPGDCRCQYGWQGLYCDKCIPHPGCVHGICNEPWQCLCETNWGGQLCDKDLNYCGTHQPCLNGGTCSNTGPDKYQCSCPEGYSGPNCEIAEHACLSDPCHNRGSCKETSLGFECECSPGWTGPTCSTNIDDCSPNNCSHGGTCQDLVNGFKCVCPPQWTGKTCQLDANECEAKPCVNAKSCKNLIASYYCDCLPGWMGQNCDININDCLGQCQNDASCRDLVNGYRCICPPGYAGDHCERDIDECASNPCLNGGHCQNEINRFQCLCPTGFSGNLCQLDIDYCEPNPCQNGAQCYNRASDYFCKCPEDYEGKNCSHLKDHCRTTPCEVIDSCTVAMASNDTPEGVRYISSNVCGPHGKCKSQSGGKFTCDCNKGFTGTYCHENINDCESNPCRNGGTCIDGVNSYKCICSDGWEGAYCETNINDCSQNPCHNGGTCRDLVNDFYCDCKNGWKGKTCHSRDSQCDEATCNNGGTCYDEGDAFKCMCPGGWEGTTCNIARNSSCLPNPCHNGGTCVVNGESFTCVCKEGWEGPICAQNTNDCSPHPCYNSGTCVDGDNWYRCECAPGFAGPDCRININECQSSPCAFGATCVDEINGYRCVCPPGHSGAKCQEVSGRPCITMGSVIPDGAKWDDDCNTCQCLNGRIACSKVWCGPRPCLLHKGHSECPSGQSCIPILDDQCFVHPCTGVGECRSSSLQPVKTKCTSDSYYQDNCANITFTFNKEMMSPGLTTEHICSELRNLNILKNVSAEYSIYIACEPSPSANNEIHVAISAEDIRDDGNPIKEITDKIIDLVSKRDGNSSLIAAVAEVRVQRRPLKNRTDFLVPLLSSVLTVAWICCLVTAFYWCLRKRRKPGSHTHSASEDNTTNNVREQLNQIKNPIEKHGANTVPIKDYENKNSKMSKIRTHNSEVEEDDMDKHQQKARFAKQPAYTLVDREEKPPNGTPTKHPNWTNKQDNRDLESAQSLNRMEYIV

SEQ ID NO: 195 - protein, 1424 aa, Homo sapiens [sequence omitted]

SEQ ID NO: 196 - protein, 626 aa, Homo sapiens
ARGSVSDEEMMELREAFAKVDTDGNGYISFNELNDLFKAACLPLPGYRVREITENLMATGDLDQDGRISFDEFIKIFHGLKSTDVAKTFRKAINKKEGICAIGGTSEQSSVGTQHSYSEEEKYAFVNWINKALENDPDCRHVIPMNPNTNDLFNAVGDGIVLCKMINLSVPDTIDERTINKKKLTPFTIQENLNLALNSASAIGCHVVNIGAEDLKEGKPYLVLGLLWQVIKIGLFADIELSRNEALIALLREGESLEDLMKLSPEELLLRWANYHLENAGCNKIGNFSTDIKDSKAYYHLLEQVAPKGDEEGVPAVVIDMSGLREKDDIQRAECMLQQAERLGCRQFVTATDVVRGNPKLNLAFIANLFNRYPALHKPENQDIDWGALEGETREERTFRNWMNSLGVNPRVNHLYSDLSDALVIFQLYEKIKVPVDWNRVNKPPYPKLGGNMKKLENCNYAVELGKNQAKFSLVGIGGQDLNEGNRTLTLALIWQLMRRYTLNILEEIGGGQKVNDDIIVNWVNETLREAEKSSSISSFKDPKISTSLPVLDLIDAIQPGSINYDLLKTENLNDDEKLNNAKYAISMARKIGARVYALPEDLVEVNPKMVMTVFACLMGKGMKRV

SEQ ID NO: 197 - protein, 433 aa, Homo sapiens
SIEKIWAREILDSRGNPTVEVDLYTAKGLFRAAVPSGASTGIYEALELRDGDKQRYLGKGVLKAVDHINSTIAPALISSGLSVVEQEKLDNLMLELDGTENKSKFGANAILGVSLAVCKAGAAERELPLYRHIAQLAGNSDLILPVPAFNVINGGSHAGNKLAMQEFMILPVGAESFRDAMRLGAEVYHTLKGVIKDKYGKDATNVGDEGGFAPNILENSEALELVKEAIDKAGYTEKIVIGMDVAASEFYRDGKYDLDFKSPTDPSRYITGDQLGALYQDFVRDYPVVSIEDPFDQDDWAAWSKFTANVGIQIVGDDLTVTNPKRIERAVEEKACNCLLLKVNQIGSVTEAIQACKLAQENGWGVMVSHRSGETEDTFIADLVVGLCTGQIKTGAPCRSERLAKYNQLMRIEEELGDEARFAGHNFRNPSVL

SEQ ID NO: 198 - protein, 2644 aa, Homo sapiens
MGEHGLELASMIPALRELGSATPEEYNTVVQKPRQILCQFIDRILTDVNVVAVELVKKTDSQPTSVMLLDFIQHIMKSSPLMFVNVSGSHEAKGSCIEFSNWIITRLLRIAATPSCHLLHKKICEVICSLLFLFKSKSPAIFGVLTKELLQLFEDLVYLHRRNVMGHAVEWPVVMSRFLSQLDEHMGYLQSAPLQLMSMQNLEFIEVTLLMVLTRIIAIVFFRRQELLLWQIGCVLLEYGSPKIKSLAISFLTELFQLGGLPAQPASTFFSSFLELLKHLVEMDTDQLKLYEEPLSKLIKTLFPFEAEAYRNIEPVYLNMLLEKLCVMFEDGVLMRLKSDLLKAALCHLLQYFLKFVPAGYESALQVRKVYVRNICKALLDVLGIEVDAEYLLGPLYAALKMESMEIIEEIQCQTQQENLSSNSDGISPKRRRLSSSLNPSKRAPKQTEEIKHVDMNQKSILWSALKQKAESLQISLEYSGLKNPVIEMLEGIAVVLQLTALCTVHCSHQNMNCRTFKDCQHKSKKKPSVVITWMSLDFYTKVLKSCRSLLESVQKLDLEATIDKVVKIYDALIYMQVNSSFEDHILEDLCGMLSLPWIYSHSDDGCLKLTTFAANLLTLSCRISDSYSPQAQSRCVFLLTLFPRRIFLEWRTAVYNWALQSSHEVIRASCVSGFFILLQQQNSCNRVPKILIDKVKDDSDIVKKEFASILGQLVCTLHGMFYLTSSLTEPFSEHGHVDLFCRNLKATSQHECSSSQLKASVCKPFLFLLKKKIPSPVKLAFIDNLHHLCKHLDFREDETDVKAVLGTLLNLMEDPDKDVRVAFSGNIKHILESLDSEDGFIKELFVLRMKEAYTHAQISRNNELKDTLILTTGDIGRAAKGDLVPFALLHLLHCLLSKSASVSGAAYTEIRALVAAKSVKLQSFFSQYKKPICQFLVESLHSSQMTALPNTPCQNADVRKQDVAHQREMALNTLSEIANVFDFPDLNRFLTRTLQVLLPDLAAKASPAASALIRTLGKQLNVNRREILINNFKYIFSHLVCSCSKDELERALHYLKNETEIELGSLLRQDFQGLHNELLLRIGEHYQQVFNGLSILASFASSDDPYQGPRDIISPELMADYLQPKLLGILAFFNMQLLSSSVGIEDKKMALNSLMSLMKLMGPKHVSSVRVKMMTTLRTGLRFKDDFPELCCRAWDCFVRCLDHACLGSLLSHVIVALLPLIHIQPKETAAIFHYLIIENRDAVQDFLHEIYFLPDHPELKKIKAVLQEYRKETSESTDLQTTLQLSMKAIQHENVDVRIHALTSLKETLYKNQEKLIKYATDSETVEPIISQLVTVLLKGCQDANSQARLLCGECLGELGAIDPGRLDFSTTETQGKDFTFVTGVEDSSFAYGLLMELTRAYLAYADNSRAQDSAAYAIQELLSIYDCREMETNGPGHQLWRRFPEHVREILEPHLNTRYKSSQKSTDWSGVKKPIYLSKLGSNFAEWSASWAGYLITKVRHDLASKIFTCCSIMMKHDFKVTIYLLPHILVYVLLGCNQEDQQEVYAEIMAVLKHDDQHTINTQDIASDLCQLSTQTVFSMLDHLTQWARHKFQALKAEKCPHSKSNRNKVDSMVSTVDYEDYQSVTRFLDLIPQDTLAVASFRSKAYTRAVMHFESFITEKKQNIQEHLGFLQKLYAAMHEPDGVAGVSAIRKAEPSLKEQILEHESLGLLRDATACYDRAIQLEPDQIIHYHGVVKSMLGLGQLSTVITQVNGVHANRSEWTDELNTYRVEAAWKLSQWDLVENYLAADGKSTTWSVRLGQLLLSAKKRDITAFYDSLKLVRAEQIVPLSAASFERGSYQRGYEYIVRLHMLCELEHSIKPLFQHSPGDSSQEDSLNWVARLEMTQNSYRAKEPILALRRALLSLNKRPDYNEMVGECWLQSARVARKAGHHQTAYNALLNAGESRLAELYVERAKWLWSKGDVHQALIVLQKGVELCFPENETPPEGKNMLIHGRAMLLVGRFMEETANFESNAIMKKYKDVTACLPEWEDGHFYLAKYYDKLMPMVTDNKMEKQGDLIRYIVLHFGRSLQYGNQFIYQSMPRMLTLWLDYGTKAYEWEKAGRSDRVQMRNDLGKINKVITEHTNYLAPYQFLTAFSQLISRICHSHDEVFVVLMEIIAKVFLAYPQQAMWMMTAVSKSSYPMRVNRCKEILNKAIHMKKSLEKFVGDATRLTDKLLELCNKPVDGSSSTLSMSTHFKMLKKLVEEATFSEILIPLQSVMIPTLPSILGTHANHASHEPFPGHWAYIAGFDDMVEILASLQKPKKISLKGSDGKFYIMMCKPKDDLRKDCRLMEFNSLINKCLRKDAESRRRELHIRTYAVIPLNDECGIIEWVNNTAGLRPILTKLYKEKGVYMTGKELRQCMLPKSAALSEKLKVFREFLLPRHPPIFHEWFLRTFPDPTSWYSSRSAYCRSTAVMSMVGYILGLGDRHGENILFDSLTGECVHVDFNCLFNKGETFEVPEIVPFRLTHNMVNGMGPMGTEGLFRRACEVTMRLMRDQREPLMSVLKTFLHDPLVEWSKPVKGHSKAPLNETGEVVNEKAKTHVLDIEQRLQGVIKTRNRVTGLPLSIEGHVHYLIQEATDENLLCQMYLGWTPYM

SEQ ID NO: 199 - protein, 354 aa, Homo sapiens
MQGLLFSTLLLAGLAQFCCRVQGTGPLDTTPEGRPGEVSDAPQRKQFCHWPCKCPQQKPRCPPGVSLVRDGCGCCKICAKQPGEICNEADLCDPHKGLYCDYSVDRPRYETGVCAYLVAVGCEFNQVHYHNGQVFQPNPLFSCLCVSGAIGCTPLFIPKLAGSHCSGAKGGKKSDQSNCSLEPLLQQLSTSYKTMPAYRNLPLIWKKKCLVQATKWTPCSRTCGMGISNRVTNENSNCEMRKEKRLCYIQPCDSNILKTIKIPKGKTCQPTFQLSKAEKFVFSGCSSTQSYKPTFCGICLDKRCCIPNKSKMITIQFDCPNEGSFKWKMLWITSCVCQRNCREPGDIFSELKIL

SEQ ID NO: 200 - protein, 1809 aa, Homo sapiens
MPSDSESSSSLSSVGTTGKAPSPPPLLTDQQVNEKVENLSIQLRLMTRERNELRKRLAFATHGTAFDKRPYHRLNPDYERLKIQCVRAMSDLQSLQNQHTNALKRCEEVAKETDFYHTLHSRLLSDQTRLKDDVDMLRRENGQLLRERNLLQQSWEDMKRLHEEDQKEIGDLRAQQQQVLKHNGSSEILNKLYDTAMDKLEVVKKDYDALRKRYSEKVAIHNADLSRLEQLGEENQRLLKQTEMLTQQRDTAIQLQHQCALSLRRFEAIHHELNKATAQNKDLQWEMELLQSELTELRTTQVKTAKESEKYREERDAVYSEYKLIMSERDQVISELDKLQTEVELAESKLKSSTSEKKAANEEMEALRQIKDTVTMDAGRANKEVEILRKQCKALCQELKEALQEADVAKCRRDWAFQERDKIVAERDSIRTLCDNLRRERDRAVSELAEALRSLDDTRKQKNDVSRELKELKEQMESQLEKEARFRQLMAHSSHDSAIDTDSMEWETEVVEFERETEDIDLKALGFDMAEGVNEPCFPGDCGIFVTKVDKGSIADGRLRVNDWLLRINDVDLINKDKKQAIKALLNGEGAINMVVRRRKSLGGKVVTPLHINLSGQKDSGISLENGVYAAAVLPGSPAAKEGSLAVGDRIVAINGIALDNKSLNECESLLRSCQDSLTLSLLKVFPQSSSWSGQNIFENIKDSDKMLSFRAHGPEVQAHNKRNLIQHNNSTQTDIFYTDRLEDRKEPGPPGGSSSFLHKPFPGGPLQVCPQACPSASERSLSSFRSDASGDRGFGLVDVRGRRPLLPFETEVGPCGVGEASLDKADSEGSNSGGTWPKAMLSSTAVPEKLSVYKKPKQRKSIFDPNTFKRPQTPPKIDYLLPGPGPAHSPQPSKRAGPLTPPKPPRRSDSIKFQHRLETSSESEATLVGSSPSTSPPSALPPDVDPGEPMHASPPRKARVRIASSYYPEGDGDSSHLPAKKSCDEDLTSQKVDELGQKRRRPKSAPSFRPKLAPVVIPAQFLEEQKCVPASGELSPELQEWAPYSPGHSSRHSNPPLYPSRPSVGTVPRSLTPSTTVSSILRNPIYTVRSHRVGPCSSPPAARDAGPQGLHPSVQHQGRLSLDLSHRTCSDYSEMRATHGSNSLPSSARLGSSSNLQFKAERIKIPSTPRYPRSVVGSERGSVSHSECSTPPQSPLNIDTLSSCSQSQTSASTLPRIAVNPASLGERRKDRPYVEEPRHVKVQKGSEPLGISIVSGEKGGIYVSKVTVGSIAHQAGLEYGDQLLEFNGINLRSATEQQARLIIGQQCDTITILAQYNPHVHQLSSHSRSSSHLDPAGTHSTLQGSGTTTPEHPSVIDPLMEQDEGPSTPPAKQSSSRIAGDANKKTLEPRVVFIKKSQLELGVHLCGGNLHGVFVAEVEDDSPAKGPDGLVPGDLILEYGSLDVRNKTVEEVYVEMLKPRDGVRLKVQYRPEEFTKAKGLPGDSFYIRALYDRLADVEQELSFKKDDILYVDDTLPQGTFGSWMAWQLDENAQKIQRGQIPSKYVMDQEFSRRLSMSEVKDDNSATKTLSAAARRSFFRRKHKHKRSGSKDGKDLLALDAFSSDSIPLFEDSVSLAYQRVQKVDCTALRPVLILGPLLDVVKEMLVNEAPGKFCRCPLEVMKASQQAIERGVKDCLFVDYKRRSGHFDVTTVASIKEITEKNRHCLLDIAPHAIERLHHMHIYPIVIFIHYKSAKHIKEQRDPIYLRDKVTQRHSKEQFEAAQKLEQEYSRYFTGVIQGGALSSICTQILAMVNQEQNKVLWIPACPL

SEQ ID NO: 201 - protein, 520 aa, Homo sapiens
MGPQRRLSPAGAALLWGFLLQLTAAQEAILHASGNGTTKDYCMLYNPYWTALPSTLENATSISLMNLTSTPLCNLSDIPPVGIKSKAVVVPWGSCHFLEKARIAQKGGAEAMLVVNNSVLFPPSGNRSEFPDVKILIAFISYKDFRDMNQTLGDNITVKMYSPSWPNFDYTMVVIFVIAVFTVALGGYWSGLVELENLKAVTTEDREMRKKKEEYLTFSPLTVVIFVVICCVMMVLLYFFYKWLVYVMIAIFCIASAMSLYNCLAALIHKIPYGQCTIACRGKNMEVRLIFLSGLCIAVAVVWAVFRNEDRWAWILQDILGIAFCLNLIKTLKLPNFKSCVILLGLLLLYDVFFVFITPFITKNGESIMVELAAGPFGNNEKLPVVIRVPKLIYFSVMSVCLMPVSILGFGDIIVPGLLIAYCRRFDVQTGSSYIYYVSSTVAYAIGMILTFVVLVLMKKGQPALLYLVPCTLITASVVAWRRKEMKKFWKGNSYQMMDHLDCATNEENPVISGEQIVQQ

SEQ ID NO: 202 - protein, 614 aa, Homo sapiens
MSGYSSDRDRGRDRGFGAPRFGGSRAGPLSGKKFGNPGEKLVKKKWNLDELPKFEKNFYQEHPDLARRTAQEVETYRRSKEITVRGHNCPKPVLNFYEANFPANVMDVIARQNFTEPTAIQAQGWPVALSGLDMVGVAQTGSGKTLSYLLPAIVHINHQPFLERGDGPICLVLAPTRELAQQVQQVAAEYCRACRLKSTCIYGGAPKGPQIRDLERGVEICIATPGRLIDFLECGKTNLRRTTYLVLDEADRMLDMGFEPQIRKIVDQIRPDRQTLMWSATWPKEVRQLAEDFLKDYIHINIGALELSANHNILQIVDVCHDVEKDEKLIRLMEEIMSEKENKTIVFVETKRRCDELTRKMRRDGWPAMGIHGDKSQQERDWVLNEFKHGKAPILIATDVASRGLDVEDVKFVINYDYPNSSEDYIHRIGRTARSTKTGTAYTFFTPNNIKQVSDLISVLREANQAINPKLLQLVEDRGSGRSRGRGGMKDDRRDRYSAGKRGGFNTFRDRENYDRGYSSLLKRDFGAKTQNGVYSAANYTNGSFGSNFVSAGIQTSFRTGNPTGTYQNGYDSTQQYGSNVPNMHNGMNQQAYAYPATAAAPMIGYPMPTGYSQ

SEQ ID NO: 203 - protein, 2960 aa, Homo sapiens
MPGIKVGGSGVNVNAKGLDLGGRGGVQVPAVDISSSLGGRPVEVQGPSLESGDHAKIKFPTMKVPKFGVSTGREGQTPKAGLRVSAPEVSVGHKGGKPGLTIQAPQLEVSVPSANIEGLEGKLKGPQITGPSLEGDLGLKGAKPQGHIGVDASAPQIGGSITGPSVEVQAPDIDVQGPGSKLNVPKMKVPKFSVSGAKGEETGIDVTLPTGEVTVPGVSGDVSLPEIATGGLEGKMKGTKVKTPEMIIQKPKISMQDVDLSLGSPKLKGDIKVSAPGVQGDVKGPQVALKGSRVDIETPNLEGTLTGPRLGSPSGKTGTCRISMSEVDLNVAAPKVKGGVDVTLPRVEGKVKVPEVDVRGPKVDVSAPDVEAHGPEWNLKMPKMKMPTFSTPGAKGEGPDVHMTLPKGDISISGPKVNVEAPDVNLEGLGGKLKGPDVKLPDMSVKTPKISMPDVDLHVKGTKVKGEYDVTVPKLEGELKGPKVDIDAPDVDVHGPDWHLKMPKMKMPKFSVPGFKAEGPEVDVNLPKADVDISGPKIDVTAPDVSIEEPEGKLKGPKFKMPEMNIKVPKISMPDVDLHLKGPNVKGEYDVTMPKVESEIKVPDVELKSAKMDIDVPDVEVQGPDWHLKMPKMKMPKFSMPGFKAEGPEVDVNLPKADVDISGPKVGVEVPDVNIEGPEGKLKGPKFKMPEMNIKAPKISMPDVDLHMKGPKVKGEYDMTVPKLEGDLKGPKVDVSAPDVEMQGPDWNLKMPKIKMPKFSMPSLKGEGPEFDVNLSKANVDISAPKVDTNAPDLSLEGPEGKLKGPKFKMPEMHFRAPKMSLPDVDLDLKGPKMKGNVDISAPKIEGEMQVPDVDIRGPKVDIKAPDVEGQGLDWSLKIPKMKMPKFSMPSLKGEGPEVDVNLPKADVDVSGPKVDIEAPDVSLEGPEGKLKGPKFKMPEMHFKTPKISMPDVDLHLKGPKVKGDVDVSVPKVEGEMKVPDVEIKGPKMDIDAPDVEVQGPDWHLKMPKMKMPKFSMPGFKGEGREVDVNLPKADIDVSGPKVDVEVPDVSLEGPEGKLKGPKFKMPEMHFKAPKISMPDVDLNLKGPKLKGDVDVSLPEVEGEMKVPDVDIKGPKVDISAPDVDVHGPDWHLKMPKVKMPKFSMPGFKGEGPEVDVKLPKADVDVSGPKMDAEVPDVNIEGPDAKLKGPKFKMPEMSIKPQKISIPDVGLHLKGPKMKGDYDVTVPKVEGEIKAPDVDIKGPKVDINAPDVEVHGPDWHLKMPKVKMPKFSMPGFKGEGPEVDMNLPKADLGVSGPKVDIDVPDVNLEAPEGKLKGPKFKMPSMNIQTHKISMPDVGLNLKAPKLKTDVDVSLPKVEGDLKGPEIDVKAPKMDVNVGDIDIEGPEGKLKGPKFKMPEMHFKAPKISMPDVDLHLKGPKVKGDMDVSVPKVEGEMKVPDVDIKGPKVDIDAPDVEVHDPDWHLKMPKMKMPKFSMPGFKAEGPEVDVNLRKADIDVSGPSVDTDAPDLDIEGPEGKLKGSKFKMPKLNIKAPKVSMPDVDLNLKGPKLKGEIDASVPELEGDLRGPQVDVKGPLVEAEVPDVDLECPDAKLKGPKFKMPEMHFKAPKISMPDVDLHLKGPKVKGDADVSVPKLEGDLTGPSVGVEVPDVELECPDAKLKGPKFKMPDMHFKAPKISMPDVDLHTLPKVEGDLKGPEADIKGPKVDINTPDVDVHGPDWHLKMPKVKMPKFSMPGFKGEGPDVDVNLPKADIDVSGPKVDVDVPDVNIEGPDAKLKGPKFKMPEMSIKAPKISMPDIDLNLKGPKVKGDVDVTLPKVEGDLKGPEADIKGPKVDINTPDVDVHGPDWHLKMPKVKMPKFSMPGFKGEGPDVDVSLPKADIDVSGPKVDVDIPDVNIEGPDPKLKVPKVKMPEINIKAPKISIPDVDLDLKGPKVKGDFDVSVPKVEGTLKGPEVDLKGPRLDFEGPDAKLSGPSLKMPSLEISAPKVTAPDVDLHLKAPKIGFSGPKLEGGEVDLKGPKVEAPSLDVHMDSPDINIEGPDVKIPKFKKPKFGFGPKSPKADIKSPSLDVTVPEAELNLETPEISVGGKGKKSKFKMPKIHMSGPKIKAKKQGFDLNVPGGEIDASLKAPDVDVNIAGPDAALKVDVKSPKTKKTMFGKMYFPDVEFDIKSPKFKAEAPLPSPKLEGELQAPDLELSLPAIHVEGLDIKAKAPKVKMPDVDISVPKIEGDLKGPKVQANLGAPDINIEGLDAKVKTPSFGISAPQVSIPDVNVNLKGPKIKGDVPSVGLEGPDVDLQGPEAKIKFPKFSMPKIGIPGVKMEGGGAEVHAQLPSLEGDLRGPDVKLEGPDVSLKGPGVDLPSVNLSMPKVSGPDLDLNLKGPSLKGDLDASVPSMKVHAPGLNLSGVGGKMQVGGDGVKVPGIDATTKLNVGAPDVTLRGPSLQGDLAVSGDIKCPKVSVGAPDLSLEASEGSIKLPKMKLPQFGISTPGSDLHVNAKGPQVSGELKGPGVDVNLKGSRISAPNVDFNLEGPKVKGSLGATGEIKGPTVGGGLPGIGVQGLEGNLQMPGIKSSGCDVNLPGVNVKLPTGQISGPEIKGGLKGSEVGFHGAAPDISVKGPAFNMASPESDFGINLKGPKIKGGADVSGGVSAPDISLGEGHLSVKGSGGEWKGPQVSSALNLDTSKFAGGLHFSGPKVEGGVKGGQIGLQAPGLSVSGPQGHLESGSGKVTFPKMKIPKFTFSGRELVGREMGVDVHFPKAEASIQAGAGDGEWEESEVKLKKSKIKMPKFNFSKPKGKGGVTGSPEASISGSKGDLKSSKASLGSLEGEAEAEASSPKGKFSLFKSKKPRHRSNSFSDEREFSGPSTPTGTLEFEGGEVSLEGGKVKGKHGKLKFGTFGGLGSKSKGHYEVTGSDDETGKLQGSGVSLASKKSRLSSSSSNDSGNKVGIQLPEVELSVSTKKE

SEQ ID NO: 204 - protein, 661 aa, Homo sapiens
MTGGRFDFDDGGTYCGGWEEGKAHGHGICTGPKGQGEYSGSWSHGFEVVGGYTWPSGNTYQGYWAQGKRHGLGVETKGKWMYRGEWSHGFKGRYGVRQSLCTPARYEGTWSNGLQDGYGVETYGDGGTYQGQWAGGMRHGYGVRQSVPYGMATVIRSPLRTSLASLRSEQSNGSVLHDAAAAADSPAGTRGGFVLNFHADAELAGKKKGGLFRRGSLLGSMKLRKSESKSSISSKRSSVRSDAAMSRISSSDANSTISFGDVDCDFCPVEDHVDATTTETYMGEWKNDKRNGFGVSERSNGMKYEGEWANNKRHGYGCTVFPDGSKEEGKYKNNILVRGIRKQLIPIRHTKTREKVDRAIEGAQRAAAMARTKVEIANSRTAHARAKADAADQAALAARQECDIARAVARELSPDFYQPGPDYVKQRFQEGVDAKENPEEKVPEKPPTPKESPHFYRKGTTPPRSPEASPKHSHSPASSPKPLKKQNPSSGARLNQDKRSVADEQVTAIVNKPLMSKAPTKEAGAVVPQSKYSGRHHIPNPSNGELHSQYHGYYVKLNAPQHPPVDVEDGDGSSQSSSALVHKPSANKWSPSKSVTKPVAKESKAEPKAKKSELAIPKNPASNDSCPALEKEANSGPNSIMIVLVMLLNIGLAILFVHFLT

SEQ ID NO: 205 - protein, 595 aa, Homo sapiens
MATKARVMYDFAAEPGNNELTVNEGEIITITNPDVGGGWLEGRNIKGERGLVPTDYVEILPSDGKDQFSCGNSVADQAFLDSLSASTAQASSSAASNNHQVGSGNDPWSAWSASKSGNWESSEGWGAQPEGAGAQRNTNTPNNWDTAFGHPQAYQGPATGDDDDWDEDWDGPKSSSYFKDSESADAGGAQRGNSRASSSSMKIPLNKFPGFAKPGTEQYLLAKQLAKPKEKIPIIVGDYGPMWVYPTSTFDCVVADPRKGSKMYGLKSYIEYQLTPTNTNRSVNHRYKHFDWLYERLLVKFGSAIPIPSLPDKQVTGRFEEEFIKMRMERLQAWMTRMCRHPVISESEVFQQFLNFRDEKEWKTGKRKAERDELAGVMIFSTMEPEAPDLDLVEIEQKCEAVGKFTKAMDDGVKELLTVGQEHWKRCTGPLPKEYQKIGKALQSLATVFSSSGYQGETDLNDAITEAGKTYEEIASLVAEQPKKDLHFLMECNHEYKGFLGCFPDIIGTHKGAIEKVKESDKLVATSKITLQDKQNMVKRVSIMSYALQAEMNHFHSNRIYDYNSVIRLYLEQQVQFYETIAEKLRQALSRFPVM

SEQ ID NO: 206 - protein, 2627 aa, Homo sapiens
MEKLHGHVSAHPDILSLENRCLAMLPDLQPLEKLHQHVSTHSDILSLKNQCLATLPDLKTMEKPHGYVSAHPDILSLENQCLATLSDLKTMEKPHGHVSAHPDILSLENRCLATLPSLKSTVSASPLFQSLQISHMTQADLYRVNNSNCLLSEPPSWRAQHFSKGLDLSTCPIALKSISATETAQEATLGRWFDSEEKKGAETQMPSYSLSLGEEEEVEDLAVKLTSGDSESHPEPTDHVLQEKKMALLSLLCSTLVSEVNMNNTSDPTLAAIFEICRELALLEPEFILKASLYARQQLNVRNVANNILAIAAFLPACRPHLRRYFCAIVQLPSDWIQVAELYQSLAEGDKNKLVPLPACLRTAMTDKFAQFDEYQLAKYNPRKHRAKRHPRRPPRSPGMEPPFSHRCFPRYIGFLREEQRKFEKAGDTVSEKKNPPRFTLKKLVQRLHIHKPAQHVQALLGYRYPSNLQLFSRSRLPGPWDSSRAGKRMKLSRPETWERELSLRGNKASVWEELIENGKLPFMAMLRNLCNLLRVGISSRHHELILQRLQHGKSVIHSRQFPFRFLNAHDAIDALEAQLRNQALPFPSNITLMRRILTRNEKNRPRRRFLCHLSRQQLRMAMRIPVLYEQLKREKLRVHKARQWKYDGEMLNRYRQALETAVNLSVKHSLPLLPGRTVLVYLTDANADRLCPKSNPQGPPLNYALLLIGMMITRAEQVDVVLCGGDTLKTAVLKAEEGILKTAIKLQAQVQEFDENDGWSLNTFGKYLLSLAGQRVPVDRVILLGQSMDDGMINVAKQLYWQRVNSKCLFVGILLRRVQYLSTDLNPNDVTLSGCTDAILKFIAEHGASHLLEHVGQMDKIFKIPPPPGKTGVQSLRPLEEDTPSPLAPVSQQGWRSIRLFISSTFRDMHGERDLLLRSVLPALQARAAPHRISLHGIDLRWGVTEEETRRNRQLEVCLGEVENAQLFVGILGSRYGYIPPSYNLPDHPHFHWAQQYPSGRSVTEMEVMQFLNRNQRLQPSAQALIYFRDSSFLSSVPDAWKSDFVSESEEAACRISELKSYLSRQKGITCRRYPCEWGGVAAGRPYVGGLEEFGQLVLQDVWNMIQKLYLQPGALLEQPVSIPDDDLVQATFQQLQKPPSPARPRLLQDTVQQLMLPHGRLSLVTGQSGQGKTAFLASLVSALQAPDGAKVAPLVFFHFSGARPDQGLALTLLRRLCTYLRGQLKEPGALPSTYRSLVWELQQRLLPKSAESLHPGQTQVLIIDGADRLVDQNGQLISDWIPKKLPRCVHLVLSVSSDAGLGETLEQSQGAHVLALGPLEASARARLVREELALYGKRLEESPFNNQMRLLLVKRESGRPLYLRLVTDHLRLFTLYEQVSERLRTLPATVPLLLQHILSTLEKEHGPDVLPQALTALEVTRSGLTVDQLHGVLSVWRTLPKGTKSWEEAVAAGNSGDPYPMGPFACLVQSLRSLLGEGPLERPGARLCLPDGPLRTAAKRCYGKRPGLEDTAHILIAAQLWKTCDADASGTFRSCPPEALGDLPYHLLQSGNRGLLSKFLTNLHVVAAHLELGLVSRLLEAHALYASSVPKEEQKLPEADVAVFRTFLRQQASILSQYPRLLPQQAANQPLDSPLCHQASLLSRRWHLQHTLRWLNKPRTMKNQQSSSLSLAVSSSPTAVAFSTNGQRAAVGTANGTVYLLDLRTWQEEKSVVSGCDGISACLFLSDDTLFLTAFDGLLELWDLQHGCRVLQTKAHQYQITGCCLSPDCRLLATVCLGGCLKLWDTVRGQLAFQHTYPKSLNCVAFHPEGQVIATGSWAGSISFFQVDGLKVTKDLGAPGASIRTLAFNVPGGVVAVGRLDSMVELWAWREGARLAAFPAHHGFVAAALFLHAGCQLLTAGEDGKVQVWSGSLGRPRGHLGSLSLSPALSVALSPDGDRVAVGYRADGIRIYKISSGSQGAQGQALDVAVSALAWLSPKVLVSGAEDGSLQGWALKECSLQSLWLLSRFQKPVLGLATSQELLASASEDFTVQLWPRQLLTRPHKAEDFPCGTELRGHEGPVSCCSFSTDGGSLATGGRDRSLLCWDVRTPKTPVLIHSFPACHRDWVTGCAWTKDNLLISCSSDGSVGLWDPESGQRLGQFLGHQSAVSAVAAVEEHVVSVSRDGTLKVWDHQGVELTSIPAHSGPISHCAAAMEPRAAGQPGSELLVVTVGLDGATRLWHPLLVCQTHTLLGHSGPVRAAAVSETSGLMLTASEDGSVRLWQVPKEADDTCIPRSSAAVTAVAWAPDGSMAVSGNQAGELILWQEAKAVATAQAPGHIGALIWSSAHTFFVLSADEKISEWQVKLRKGSAPGNLSLHLNRILQEDLGVLTSLDWAPDGHFLILAKADLKLLCMKPGDAPSEIWSSYTENPMILSTHKEYGIFVLQPKDPGVLSFLRQKESGEFEERLNFDINLENPSRTLISITQAKPESESSFLCASSDGILWNLAKCSPEGEWTTGNMWQKKANTPETQTPGTDPSTCRESDASMDSDASMDSEPTPHLKTRQRRKIHSGSVTALHVLPELLVTASKDRDVKLWERPSMQLLGLFRCEGSVSCLEPWLGANSTLQLAVGDVQGNVYFLNWE

SEQ ID NO: 207 - protein, 396 aa, Homo sapiens
MALLTNLLPLCCLALLALPAQSCGPGRGPVGRRRYARKQLVPLLYKQFVPGVPERTLGASGPAEGRVARGSERFRDLVPNYNPDIIFKDEENSGADRLMTERCKERVNALAIAVMNMWPGVRLRVTEGWDEDGHHAQDSLHYEGRALDITTSDRDRNKYGLLARLAVEAGFDWVYYESRNHVHVSVKADNSLAVRAGGCFPGNATVRLWSGERKGLRELHRGDWVLAADASGRVVPTPVLLFLDRDLQRRASFVAVETEWPPRKLLLTPWHLVFAARGPAPAPGDFAPVFARRLRAGDSVLAPGGDALRPARVARVAREEAVGVFAPLTAHGTLLVNDVLASCYAVLESHQWAHRAFAPLRLLHALGALLPGGAVQPTGMHWYSRLLYRLAEELLG

SEQ ID NO: 208 - protein, 146 aa, Homo sapiens
MIDVMQIQEILPHRYPFLLVDKITELKVKEVVLGYKNISISDHVFMGHFPGHPIYPGVLILEGMAQTGGVLAFESMEDKVDPKSKVVYFTGIDGAKFRNPVRPGDRLDYEMSVVKNRGNMWIFKGQAFVDGNLVAEAELKAMIVDK

SEQ ID NO: 209 - protein, 51 aa, Homo sapiens
FQFSAQLGAMQHLKDQLEQRTRMIEANIRRQQEELRKIQEQLQMVHGQGLQ

SEQ ID NO: 210 - protein, 1130 aa, Homo sapiens
MAAAGQLCLLYLSAGLLSRLGAAFNLDTREDNVIRKYGDPGSLFGFSLAMHWQLQPEDKRLLLVGAPRGEALPLQRANRTGGLYSCDITARGPCTRIEFDNDADPTSESKEDQWMGVTVQSQGPGGKVVTCAHRYEKRQHVNTKQESRDIFGRCYVLSQNLRIEDDMDGGDWSFCDGRLRGHEKFGSCQQGVAATFTKDFHYIVFGAPGTYNWKGIVRVEQKNNTFFDMNIFEDGPYEVGGETEHDESLVPVPANSYLGLLFLTSVSYTDPDQFVYKTRPPREQPDTFPDVMMNSYLGFSLDSGKGIVSKDEITFVSGAPRANHSGAVVLLKRDMKSAHLLPEHIFDGEGLASSFGYDVAVVDLNKDGWQDIVIGAPQYFDRDGEVGGAVYVYMNQQGRWNNVKPIRLNGTKDSMFGIAVKNIGDINQDGYPDIAVGAPYDDLGKVFIYHGSANGINTKPTQVLKGISPYFGYSIAGNMDLDRNSYPDVAVGSLSDSVTIFRSRPVINIQKTITVTPNRIDLRQKTACGAPSGICLQVKSCFEYTANPAGYNPSISIVGTLEAEKERRKSGLSSRVQFRNQGSEPKYTQELTLKRQKQKVCMEETLWLQDNIRDKLRPIPITASVEIQEPSSRRRVNSLPEVLPILNSDEPKTAHIDVHFLKEGCGDDNVCNSNLKLEYKFCTREGNQDKFSYLPIQKGVPELVLKDQKDIALEITVTNSPSNPRNPTKDGDDAHEAKLIATFPDTLTYSAYRELRAFPEKQLSCVANQNGSQADCELGNPFKRNSNVTFYLVLSTTEVTFDTPDLDINLKLETTSNQDNLAPITAKAKVVIELLLSVSGVAKPSQVYFGGTVVGEQAMKSEDEVGSLIEYEFRVINLGKPLTNLGTATLNIQWPKEISNGKWLLYLVKVESKGLEKVTCEPQKEINSLNLTESHNSRKKREITEKQIDDNRKFSLFAERKYQTLNCSVNVNCVNIRCPLRGLDSKASLILRSRLWNSTFLEEYSKLNYLDILMRAFIDVTAAAENIRLPNAGTQVRVTVFPSKTVAQYSGVPWWIILVAILAGILMLALLVFILWKCGFFKRSRYDDSVPRYHAVRIRKEEREIKDEKYIDNLEKKQWITKWNRNESYS

SEQ ID NO: 211 - protein, 961 aa, Homo sapiens
MEVPAAGRVPAEGAPTAAVAEVRCPGPAPLRLLEWRVAAGAAVRIGSVLAVFEAAASAQSAGASQSRVASGGCVRPARPERRLRSERAGVVRELCAQPGQVVAPGAVLVRLEGCSHPVVMKGLCAECGQDLTQLQSKNGKQQVPLSTATVSMVHSVPELMVSSEQAEQLGREDQQRLHRNRKLVLMVDLDQTLIHTTEQHCQQMSNKGIFHFQLGRGEPMLHTRLRPHCKDFLEKIAKLYELHVFTFGSRLYAHTIAGFLDPEKKLFSHRILSRDECIDPFSKTGNLRNLFPCGDSMVCIIDDREDVWKFAPNLITVKKYVYFQGTGDMNAPPGSRESQTRKKVNHSRGTEVSEPSPPVRDPEGVTQAPGVEPSNGLEKPARELNGSEAATPRDSPRPGKPDERDIWPPAQAPTSSQELAGAPEPQGSCAQGGRVAPGQRPAQGATGTDLDFDLSSDSESSSESEGTKSSSSASDGESEGKRGRQKPKAAPEGAGALAQGSSLEPGRPAAPSLPGEAEPGAHAPDKEPELGGQEEGERDGLCGLGNGCADRKEAETESQNSELSGVTAGESLDQSMEEEEEEDTDEDDHLIYLEEILVRVHTDYYAKYDRYLNKEIEEAPDIRKIVPELKSKVLADVAIIFSGLHPTNFPIEKTREHYHATALGAKILTRLVLSPDAPDRATHLIAARAGTEKVLQAQECGHLHVVNPDWLWSCLERWDKVEEQLFPLRDDHTKAQRENSPAAFPDREGVPPTALFHPMPVLPKAQPGPEVRIYDSNTGKLIRTGARGPPAPSSSLPIRQEPSSFRAVPPPQPQMFGEELPDAQDGEQPGPSRRKRQPSMSETMPLYTLCKEDLESMDKEVDDILGEGSDDSDSEKRRPEEQEEEPQPRKPGTRRGADARAPASSERSAAGGRGPRGHKRKLNEEDAASESSRESSNEDEGSSSEADEMAKALEAELNDLM

SEQ ID NO: 212 - protein, 150 aa, Homo sapiens
MYGKIIFVLLLSAIVSISASSTTGVAMHTSTSSSVTKSYISSQTNDTHKRDTYAATPRAHEVSEISVRTVYPPEEETGERVQLAHHFSEPEITLIIFGVMAGVIGTILLISYGIRRLIKKSPSDVKPLPSPDTDVPLSSVEIENPETSDQ

SEQ ID NO: 213 - protein, 968 aa, Homo sapiens
MLTEASLSIWGWGSLGIVLFLITFGPFVIFYLTFYILCFVGGGLVVTLLFGKTNSEKYLEQCEHSFLPPTSPGVPKCLEEMKREARTIKIDRRLTGANIIDEPLQQVIQFSLRDYVQYWYYTLSDDESFLLEIRQTLQNALIQFATRSKEIDWQPYFTTRIVDDFGTHLRVFRKAQQKITEKDDQVKGTAEDLVDTFFEVEVEMEKEVCRDLVCTSPKDEEGFLRDLCEVLLYLLLPPGDFQNKIMRYFVREILARGILLPLINQLSDPDYINQYVIWMIRDSNCNYEAFMNIIKLSDNIGELEAVRDKAAEELQYLRSLDTAGDDINTIKNQINSLLFVKKVCDSRIQRLQSGKEINTVKLAANFGKLCTVPLDSILVDNVALQFFMDYMQQTGGQAHLFFWMTVEGYRVTAQQQLEVLLSRQRDGKHQTNQTKGLLRAAAVGIYEQYLSEKASPRVTVDDYLVAKLADTLNHEDPTPEIFDDIQRKVYELMLRDERFYPSFRQNALYVRMLAELDMLKDPSFRGSDDGDGESFNGSPTGSINLSLDDLSNVSSDDSVQLHAYISDTVYADYDPYAVAGVCNDHGKTYALYAITVHRRNLNSEEMWKTYRRYSDFHDFHMRITEQFESLSSILKLPGKKTFNNMDRDFLEKRKKDLNAYLQLLLAPEMMKASPALAHYVYDFLENKAYSKGKGDFARKMDTFVNPLRNSMRNVSNAVKSLPDSLAEGMTKMSDNMGKMSERLGQDIKQSFFKVPPLIPKTDSDPEHRRVSAQLDDNVDDNIPLRVMLLLMDEVFDLKERNQWLRRNIKNLLQQLIRATYGDTINRKIVDHVDWMTSPEQVADSVKRFRDAFWPNGILAEAVPCRDKSIRMRTRVAGKTKLLAIMPDELKHIIGAETTRKGILRVFEMFQHNQLNRRMVYVFLEGFLETLFPQYKFRELFNKLHSRSKQMQKYKQKLQTTQAPSLQKR

SEQ ID NO: 214 - protein, 538 aa, Homo sapiens
MTTPGKENFRLKSYKNKSLNPDEMRRRREEEGLQLRKQKREEQLFKRRNVATAEEETEEEVMSDGGFHEAQINNMEMAPGGVITSDMIEMIFSKSPEQQLSATQKFRKLLSKEPNPPIDEVISTPGVVARFVEFLKRKENCTLQFESAWVLTNIASGNSLQTRIVIQAGAVPIFIELLSSEFEDVQEQAVWALGNIAGDSTMCRDYVLDCNILPPLLQLFSKQNRLTMTRNAVWALSNLCRGKSPPPEFAKVSPCLNVLSWLLFVSDTDVLADACWALSYLSDGPNDKIQAVIDAGVCRRLVELLMHNDYKVVSPALRAVGNIVTGDDIQTQVILNCSALQSLLHLLSSPKESIKKEACWTISNITAGNRAQIQTVIDANIFPALISILQTAEFRTRKEAAWAITNATSGGSAEQIKYLVELGCIKPLCDLLTVMDSKIVQVALNGLENILRLGEQEAKRNGTGINPYCALIEEAYGLDKIEFLQSHENQEIYQKAFDLIEHYFGTEDEDSSIAPQVDLNQQQYIFQQCEAPMEGFQL

SEQ ID NO: 215 - protein, 519 aa, Homo sapiens
MAAEREPPPLGDGKPTDFEDLEDGEDLFTSTVSTLESSPSSPEPASLPAEDISANSNGPKPTEVVLDDDREDLFAEATEEVSLDSPEREPILSSEPSPAVTPVTPTTLIAPRIESKSMSAPVIFDRSREEIEEEANGDIFDIEIGVSDPEKVGDGMNAYMAYRVTTKTSLSMFSKSEFSVKRRFSDFLGLHSKLASKYLHVGYIVPPAPEKSIVGMTKVKVGKEDSSSTEFVEKRRAALERYLQRTVKHPTLLQDPDLRQFLESSELPRAVNTQALSGAGILRMVNKAADAVNKMTIKMNESDAWFEEKQQQFENLDQQLRKLHVSVEALVCHRKELSANTAAFAKSAAMLGNSEDHTALSRALSQLAEVEEKIDQLHQEQAFADFYMFSELLSDYIRLIAAVKGVFDHRMKCWQKWEDAQITLLKKREAEAKMMVANKPDKIQQAKNEIREWEAKVQQGERDFEQISKTIRKEVGRFEKERVKDFKTVIIKYLESLVQTQQQLIKYWEAFLPEAKAIA

SEQ ID NO: 216 - protein, 2321 aa, Homo sapiens
MGPGARGRRRRRRPMSPPPPPPPVRALPLLLLLAGPGAAAPPCLDGSPCANGGRCTQLPSREAACLCPPGWVGERCQLEDPCHSGPCAGRGVCQSSVVAGTARFSCRCPRGFRGPDCSLPDPCLSSPCAHGARCSVGPDGRFLCSCPPGYQGRSCRSDVDECRVGEPCRHGGTCLNTPGSFRCQCPAGYTGPLCENPAVPCAPSPCRNGGTCRQSGDLTYDCACLPGFEGQNCEVNVDDCPGHRCLNGGTCVDGVNTYNCQCPPEWTGQFCTEDVDECQLQPNACHNGGTCFNTLGGHSCVCVNGWTGESCSQNIDDCATAVCFHGATCHDRVASFYCACPMGKTGLLCHLDDACVSNPCHEDAICDTNPVNGRAICTCPPGFTGGACDQDVDECSIGANPCEHLGRCVNTQGSFLCQCGRGYTGPRCETDVNECLSGPCRNQATCLDRIGQFTCICMAGFTGTYCEVDIDECQSSPCVNGGVCKDRVNGFSCTCPSGFSGSTCQLDVDECASTPCRNGAKCVDQPDGYECRCAEGFEGTLCDRNVDDCSPDPCHHGRCVDGIASFSCACAPGYTGTRCESQVDECRSQPCRHGGKCLDLVDKYLCRCPSGTTGVNCEVNIDDCASNPCTFGVCRDGINRYDCVCQPGFTGPLCNVEINECASSPCGEGGSCVDGENGFRCLCPPGSLPPLCLPPSHPCAHEPCSHGICYDAPGGFRCVCEPGWSGPRCSQSLARDACESQPCRAGGTCSSDGMGFHCTCPPGVQGRQCELLSPCTPNPCEHGGRCESAPGQLPVCSCPQGWQGPRCQQDVDECAGPAPCGPHGICTNLAGSFSCTCHGGYTGPSCDQDINDCDPNPCLNGGSCQDGVGSFSCSCLPGFAGPRCARDVDECLSNPCGPGTCTDHVASFTCTCPPGYGGFHCEQDLPDCSPSSCFNGGTCVDGVNSFSCLCRPGYTGAHCQHEADPCLSRPCLHGGVCSAAHPGFRCTCLESFTGPQCQTLVDWCSRQPCQNGGRCVQTGAYCLCPPGWSGRLCDIRSLPCREAAAQIGVRLEQLCQAGGQCVDEDSSHYCVCPEGRTGSHCEQEVDPCLAQPCQHGGTCRGYMGGYMCECLPGYNGDNCEDDVDECASQPCQHGGSCIDLVARYLCSCPPGTLGVLCEINEDDCGPGPPLDSGPRCLHNGTCVDLVGGFRCTCPPGYTGLRCEADINECRSGACHAAHTRDCLQDPGGGFRCLCHAGFSGPRCQTVLSPCESQPCQHGGQCRPSPGPGGGLTFTCHCAQPFWGPRCERVARSCRELQCPVGVPCQQTPRGPRCACPPGLSGPSCRSFPGSPPGASNASCAAAPCLHGGSCRPAPLAPFFRCACAQGWTGPRCEAPAAAPEVSEEPRCPRAACQAKRGDQRCDRECNSPGCGWDGGDCSLSVGDPWRQCEALQCWRLFNNSRCDPACSSPACLYDNFDCHAGGRERTCNPVYEKYCADHFADGRCDQGCNTEECGWDGLDCASEVPALLARGVLVLTVLLPPEELLRSSADFLQRLSAILRTSLRFRLDAHGQAMVFPYHRPSPGSEPRARRELAPEVIGSVVMLEIDNRLCLQSPENDHCFPDAQSAADYLGALSAVERLDFPYPLRDVRGEPLEPPEPSVPLLPLLVAGAVLLLVILVLGVMVARRKREHSTLWFPEGFSLHKDVASGHKGRREPVGQDALGMKNMAKGESLMGEVATDWMDTECPEAKRLKVEEPGMGAEEAVDCRQWTQHHLVAADIRVAPAMALTPPQGDADADGMDVNVRGPDGFTPLMLASFCGGALEPMPTEEDEADDTSASIISDLICQGAQLGARTDRTGETALHLAARYARADAAKRLLDAGADTNAQDHSGRTPLHTAVTADAQGVFQILIRNRSTDLDARMADGSTALILAARLAVEGMVEELIASHADVNAVDELGKSALHWAAAVNNVEATLALLKNGANKDMQDSKEETPLFLAAREGSYEAAKLLLDHFANREITDHLDRLPRDVAQERLHQDIVRLLDQPSGPRSPPGPHGLGPLLCPPGAFLPGLKAAQSGSKKSRRPPGKAGLGPQGPRGRGKKLTLACPGPLADSSVTLSPVDSLDSPRPFGGPPASPGGFPLEGPYAAATATAVSLAQLGGPGRAGLGRQPPGGCVLSLGLLNPVAVPLDWARLPPPAPPGPSFLLPLAPGPQLLNPGTPVSPQERPPPYLAVPGHGEEYPVAGAHSSPPKARFLRVPSEHPYLTPSPESPEHWASPSPPSLSDWSESTPSPATATGAMATTTGALPAQPLPLSVPSSLAQAQTQLGPQPEVTPKRQVLA

SEQ ID NO: 217 - protein, 1137 aa, Homo sapiens
MSRRKPASGGLAASSSAPARQAVLSRFFQSTGSLKSTSSSTGAADQVDPGAAAAAAAAAAAAPPAPPAPAFPPQLPPHVATEIDRRKKRPLENDGPVKKKVKKVQQKEGGSDLGMSGNSEPKKCLRTRNVSKSLEKLKEFCCDSALPQSRVQTESLQERFAVLPKCTDFDDISLLHAKNAVSSEDSKRQINQKDTTLFDLSQFGSSNTSHENLQKTASKSANKRSKSIYTPLELQYIEMKQQHKDAVLCVECGYKYRFFGEDAEIAARELNIYCHLDHNFMTASIPTHRLFVHVRRLVAKGYKVGVVKQTETAALKAIGDNRSSLFSRKLTALYTKSTLIGEDVNPLIKLDDAVNVDEIMTDTSTSYLLCISENKENVRDKKKGNIFIGIVGVQPATGEVVFDSFQDSASRSELETRMSSLQPVELLLPSALSEQTEALIHRATSVSVQDDRIRVERMDNIYFEYSHAFQAVTEFYAKDTVDIKGSQIISGIVNLEKPVICSLAAIIKYLKEFNLEKMLSKPENFKQLSSKMEFMTINGTTLRNLEILQNQTDMKTKGSLLWVLDHTKTSFGRRKLKKWVTQPLLKLREINARLDAVSEVLHSESSVFGQIENHLRKLPDIERGLCSIYHKKCSTQEFFLIVKTLYHLKSEFQAIIPAVNSHIQSDLLRTVILEIPELLSPVEHYLKILNEQAAKVGDKTELFKDLSDFPLIKKRKDEIQGVIDEIRMHLQEIRKILKNPSAQYVTVSGQEFMIEIKNSAVSCIPTDWVKVGSTKAVSRFHSPFIVENYRHLNQLREQLVLDCSAEWLDFLEKFSEHYHSLCKAVHHLATVDCIFSLAKVAKQGDYCRPTVQEERKIVIKNGRHPVIDVLLGEQDQYVPNNTDLSEDSERVMIITGPNMGGKSSYIKQVALITIMAQIGSYVPAEEATIGIVDGIFTRMGAADNIYKGRSTFMEELTDTAEIIRKATSQSLVILDELGRGTSTHDGIAIAYATLEYFIRDVKSLTLFVTHYPPVCELEKNYSHQVGNYHMGFLVSEDESKLDPGTAEQVPDFVTFLYQITRGIAARSYGLNVAKLADVPGEILKKAAHKSKELEGLINTKRKRLKYFAKLWTMHNAQDLQKWTEEFNMEETQTSLLH

SEQ ID NO: 218 - protein, 2287 aa, Homo sapiens
CHFWNSVDQKNCALKCRESCEVGCSSAEGAYEEEVLENADLPTAPFASSIGSHNMTLRWKSANFSGVKYIIQWKYAQLLGSWTYTKTVSRPSYVVKPLHPFTEYIFRVVWIFTAQLQLYSPPSPSYRTHPHGVPETAPLIRNIESSSPDTVEVSWDPPQFPGGPILGYNLRLISKNQKLDAGTQRTSFQFYSTLPNTIYRFSIAAVNEVGEGPEAESSITTSSSAVQQEEQWLFLSRKTSLRKRSLKHLVDEAHCLRLDAIYHNITGISVDVHQQIVYFSEGTLIWAKKAANMSDVSDLRIFYRGSGLISSISIDWLYQRMYFIMDELVCVCDLENCSNIEEITPPSISAPQKIVADSYNGYVFYLLRDGIYRADLPVPSGRCAEAVRIVESCTLKDFAIKPQAKRIIYFNDTAQVFMSTFLDGSASHLILPRIPFADVKSFACENNDFLVTDGKVIFQQDALSFNEFIVGCDLSHIEEFGFGNLVIFGSSSQLHPLPGRPQELSVLFGSHQALVQWKPPALAIGANVILISDIIELFELGPSAWQNWTYEVKVSTQDPPEVTHIFLNISGTMLNVPELQSAMKYKVSVRASSPKRPGPWSEPSVGTTLVPASEPPFIMAVKEDGLWSKPLNSFGPGEFLSSDIGNVSDMDWYNNSLYYSDTKGDVFVWLLNGTDISENYHLPSIAGAGALAFEWLGHFLYWAGKTYVIQRQSVLTGHTDIVTHVKLLVNDMVVDSVGGYLYWTTLYSVESTRLNGESSLVLQTQPWFSGKKVIALTLDLSDGLLYWLVQDSQCIHLYTAVLRGQSTGDTTITEFAAWSTSEISQNALMYYSGRLFWINGFRIITTQEIGQKTSVSVLEPARFNQFTIIQTSLKPLPGNFSFTPKVIPDSVQESSFRIEGNASSFQILWNGPPAVDWGVVFYSVEFSAHSKFLASEQHSLPVFTVEGLEPYALFNLSVTPYTYWGKGPKTSLSLRAPETVPSAPENPRIFILPSGKCCNKNEVVVEFRWNKPKHENGVLTKFEIFYNISNQSITNKTCEDWIAVNVTPSVMSFQLEGMSPRCFIAFQVRAFTSKGPGPYADVVKSTTSEINPFPHLITLLGNKIVFLDMDQNQVVWTFSAERVISAVCYTADNEMGYYAEGDSLFLLHLHNRSSSELFQDSLVFDITVITIDWISRHLYFALKESQNGMQVFDVDLEHKVKYPREVKIHNRNSTIISFSVYPLLSRLYWTEVSNFGYQMFYYSIISHTLHRILQPTATNQQNKRNQCSCNVTEFELSGAMAIDTSNLEKPLIYFAKAQEIWAMDLEGCQCWRVITVPAMLAGKTLVSLTVDGDLIYWIITAKDSTQIYQAKKGNGAIVSQVKALRSRHILAYSSVMQPFPDKAFLSLASDTVEPTILNATNTSLTIRLPLAKTNLTWYGITSPTPTYLVYYAEVNDRKNSSDLKYRILEFQDSIALIEDLQPFSTYMIQIAVKNYYSDPLEHLPPGKEIWGKTKNGVPEAVQLINTTVRSDTSLIISWRESHKPNGPKESVRYQLAISHLALIPETPLRQSEFPNGRLTLLVTRLSGGNIYVLKVLACHSEEMWCTESHPVTVEMFNTPEKPYSLVPENTSLQFNWKAPLNVNLIRFWVELQKWKYNEFYHVKTSCSQGPAYVCNITNLQPYTSYNVRVVVVYKTGENSTSLPESFKTKAGVPNKPGIPKLLEGSKNSIQWEKAEDNGCRITYYILEIRKSTSNNLQNQNLRWKMTFNGSCSSVCTWKSKNLKGIFQFRVVAANNLGFGEYSGISENIILVGDDFWIPETSFILTIIVGIFLVVTIPLTFVWHRRLKNQKSAKEGVTVLINEDKELAELRGLAAGVGLANACYAIHTLPTQEEIENLPAFPREKLTLRLLLGSGAFGEVYEGTAVDILGVGSGEIKVAVKTLKKGSTDQEKIEFLKEAHLMSKFNHPNILKQLGVCLLNEPQYIILELMEGGDLLTYLRKARMATFYGPLLTLVDLVDLCVDISKGCVYLERMHFIHRDLAARNCLVSVKDYTSPRIVKIGDFGLARDIYKNDYYRKRGEGLLPVRWMAPESLMDGIFTTQSDVWSFGILIWEILTLGHQPYPAHSNLDVLNYVQTGGRLEPPRNCPDDLWNLMTQCWAQEPDQRPTFHRIQNQLQLFRNFFLNSIYQCRDEANNSGVINESFEGEDGDVICLNSDDIMPVVLMETKNREGLNYMVLATECGQGEEKSEGPLGSQESESCGLRKEEKEPHADKDFCQEKQVAYCPSGKPEGLNYACLTHSGYGDGSD

SEQ ID NO: 219 - protein, 784 aa, Homo sapiens
MQRLMMLLATSGACLGLLAVAAVAAAGANPAQRDTHSLLPTHRRQKRDWIWNQMHIDEEKNTSLPHHVGKIKSSVSRKNAKYLLKGEYVGKVFRVDAETGDVFAIERLDRENISEYHLTAVIVDKDTGENLETPSSFTIKVHDVNDNWPVFTHRLFNASVPESSAVGTSVISVTAVDADDPTVGDHASVMYQILKGKEYFAIDNSGRIITITKSLDREKQARYEIVVEARDAQGLRGDSGTATVLVTLQDINDNFPFFTQTKYTFVVPEDTRVGTSVGSLFVEDPDEPQNRMTKYSILRGDYQDAFTIETNPAHNEGIIKPMKPLDYEYIQQYSFIVEATDPTIDLRYMSPPAGNRAQVIINITDVDEPPIFQQPFYHFQLKENQKKPLIGTVLAMDPDAARHSIGYSIRRTSDKGQFFRVTKKGDIYNEKELDREVYPWYNLTVEAKELDSTGTPTGKESIVQVHIEVLDENDNAPEFAKPYQPKVCENAVHGQLVLQISAIDKDITPRNVKFKFTLNTENNFTLTDNHDNTANITVKYGQFDREHTKVHFLPVVISDNGMPSRTGTSTLTVAVCKCNEQGEFTFCEDMAAQVGVSIQAVVAILLCILTITVITLLIFLRRRLRKQARAHGKSVPEIHEQLVTYDEEGGGEMDTTSYDVSVLNSVRRGGAKPPRPALDARPSLYAQVQKPPRHAPGAHGGPGEMAAMIEVKKDEADHDGDGPPYDTLHIYGYEGSESIAESLSSLGTDSSDSDVDYDFLNDWGPRFKMLAELYGSDPREELLY

SEQ ID NO: 220 - protein, 3075 aa, Homo sapiens
MRGGVLLVLLLCVAAQCRQRGLFPAILNLASNAHISTNATCGEKGPEMFCKLVEHVPGRPVRNPQCRICDGNSANPRERHPISHAIDGTNNWWQSPSIQNGREYHWVTITLDLRQVFQVAYVIIKAANAPRPGNWILERSLDGTTFSPWQYYAVSDSECLSRYNITPRRGPPTYRADDEVICTSYYSRLVPLEHGEIHTSLINGRPSADDLSPKLLEFTSARYIRLRLQRIRTLNADLMTLSHREPKELDPIVTRRYYYSIKDISVGGMCICYGHASSCPWDETTKKLQCQCEHNTCGESCNRCCPGYHQQPWRPGTVSSGNTCEACNCHNKAKDCYYDESVAKQKKSLNTAGQFRGGGVCINCLQNTMGINCETCIDGYYRPHKVSPYEDEPCRPCNCDPVGSLSSVCIKDDLHSDLHNGKQPGQCPCKEGYTGEKCDRCQLGYKDYPTCVSCGCNPVGSASDEPCTGPCVCKENVEGKACDRCKPGFYNLKEKNPRGCSECFCFGVSDVCSSLSWPVGQVNSMSGWLVTDLISPRKIPSQQDALGGRHQVSINNTAVMQRLAPKYYWAAPEAYLGNKLTAFGGFLKYTVSYDIPVETVDSNLMSHADVIIKGNGLTLSTQAEGLSLQPYEEYLNVVRLVPENFQDFHSKRQIDRDQLMTVLANVTHLLIRATYNSAKMALYRLESVSLDIASSNAIDLVVAADVEHCECPQGYTGTSCESCLSGYYRVDGILFGGICQPCECHGHAAECNVHGVCIACAHNTTGVHCEQCLPGFYGEPSRGTPGDCQPCACPLTIASNNFSPTCHLNDGDEVVCDWCAPGYSGAWCERCADGYYGNPTVPGESCVPCDCSGNVDPSEAGHCDSVTGECLKCLGNTDGAHCERCADGFYGDAVTAKNCRACECHVKGSHSAVCHLETGLCDCKPNVTGQQCDQCLHGYYGLDSGHGCRPCNCSVAGSVSDGCTDEGQCHCVPGVAGKRCDRCAHGFYAYQDGSCTPCDCPHTQNTCDPETGECVCPPHTQGGKCEECEDGHWGYDAEVGCQACNCSLVGSTHHRCDVVTGHCQCKSKFGGRACDQCSLGYRDFPDCVPCDCDLRGTSGDACNLEQGLCGCVEETGACPCKENVFGPQCNECREGTFALRADNPLGCSPCFCSGLSHLCSELEDYVRTPVTLGSDQPLLRVVSQSNLRGTTEGVYYQAPDFLLDAATVRQHIRAEPFYWRLPQQFQGDQLMAYGGKLKYSVAFYSLDGVGTSNFEPQVLIKGGRIRKQVIYMDAPAPENGVRQEQEVAMRENFWKYFNSVSEKPVTREDFMSVLSDIEYILIKASYGQGLQQSRISDISVEVGRKAEKLHPEEEVASLLENCVCPPGTVGFSCQDCAPGYHRGKLPAGSDRGPRPLVAPCVPCSCNNHSDTCDPNTGKCLNCGDNTAGDHCDVCTSGYYGKVTGSASDCALCACPHSPPASFSPTCVLEGDHDFRCDACLLGYEGKHCERCSSSYYGNPQTPGGSCQKCDCNRHGSVHGDCDRTSGQCVCRLGASGLRCDECEPRHILMETDCVSCDDECVGVLLNDLDEIGDAVLSLNLTGIIPVPYGILSNLENTTKYLQESLLKENMQKDLGKIKLEGVAEETDNLQKKLTRMLASTQKVNRATERIFKESQDLAVAIERLQMSITEIMEKTTLNQTLDEDFLLPNSTLQNMQQNGTSLLEIMQIRDFTQLHQNATLELKAAEDLLSQIQENYQKPLEELEVLKEAASHVLSKHNNELKAAEALVREAEAKMQESNHLLLMVNANLREFSDKKLHVQEEQNLTSELIVQGRGLIDAAAAQTDAVQDALEHLEDHQDKLLLWSAKIRHHIDDLVMHMSQRNAVDLVYRAEDHATEFQRLADVLYSGLENIRNVSLNATSAAYVHYNIQSLIEESEELARDAHRTVTETSLLSESLVSNGKAAVQRSSRFLKEGNNLSRKLPGIALELSELRNKTNRFQENAVEITRQTNESLLILRAIPEGIRDKGAKTKELATSASQSAVSTLRDVAGLSQELLNTSASLSRVNTTLRETHQLLQDSTMATLLAGRKVKDVEIQANLLFDRLKPLKMLEENLSRNLSEIKLLISQARKQAASIKVAVSADRDCIRAYQPQISSTNYNTLTLNVKTQEPDNLLFYLGSSTASDFLAVEMRRGRVAFLWDLGSGSTRLEFPDFPIDDNRWHSIHVARFGNIGSLSVKEMSSNQKSPTKTSKSPGTANVLDVNNSTLMFVGGLGGQIKKSPAVKVTHFKGCLGEAFLNGKSIGLWNYIEREGKCRGCFGSSQNEDPSFHFDGSGYSVVEKSLPATVTQIIMLFNTFSPNGLLLYLGSYGTKDFLSIELFRGRVKVMTDLGSGPITLLTDRRYNNGTWYKIAFQRNRKQGVLAVIDAYNTSNKETKQGETPGASSDLNRLDKDPIYVGGLPRSRVVRRGVTTKSFVGCIKNLEISRSTFDLLRNSYGVRKGCLLEPIRSVSFLKGGYIELPPKSLSPESEWLVTFATTNSSGIILAALGGDVEKRGDREEAHVPFFSVMLIGGNIEVHVNPGDGTGLRKALLHAPTGTCSDGQAHSISLVRNRRIITVQLDENNPVEMKLGTLVESRTINVSNLYVGGIPEGEGTSLLTMRRSFHGCIKNLIFNLELLDFNSAVGHEQVDLDTCWLSERPKLAPDAEDSKLLREPRAFPEQCVVDAALEYVPGAHQFGLTQNSHFILPFNQSAVRKKLSVELSIRTFASSGLIYYMAHQNQADYAVLQLHGGRLHFMFDLGKGRTKVSHPALLSDGKWHTVKTDYVKRKGFITVDGRESPMVTVVGDGTMLDVEGLFYLGGLPSQYQARKIGNITHSIPACIGDVTVNSKQLDKDSPVSAFTVNRCYAVAQEGTYFDGSGYAALVKEGYKVQSDVNITLEFRTSSQNGVLLGISTAKVDAIGLELVDGKVLFHVNNGAGRITPAYEPKTATVLCDGKWHTLQANKSKHRITLIVDGNAVGAESPHTQSTSVDTNNPIYVGGYPAGVKQKCLRSQTSFRGCLRKLALIKSPQVQSFDFSRAFELHGVFLHSCPGTES

SEQ ID NO: 221 - protein, 1618 aa, Homo sapiens
MEGCMGEESFQMWELNRRLEAYLGRVKALEEQNELLSAGLGGLRRQSADTSWRAHADDELAALRALVDQRWREKHAAEVARDNLAEELEGVAGRCEQLRLARERTTEEVARNRRAVEAEKCARAWLSSQGAELERELEALRVAHEEERVGLNAQAACAPRLPAPPRPPAPAPEVEELARRLGEAWRGAVRGYQERVAHMETSLDQTRERLARAVQGAREVRLELQQLQAERGGLLERRAALEQRLEGRWQERLRATEKFQLAVEALEQEKQGLQSQIAQVLEGRQQLAHLKMSLSLEVATYRTLLEAENSRLQTPGGGSKTSLSFQDPKLELQFPRTPEGRRLGSLLPVLSPTSLPSPLPATLETPVPAFLKNQEFLQARTPTLASTPIPPTPQAPSPAVDAEIRAQDAPLSLLQTQGGRKQAPEPLRAEARVAIPASVLPGPEEPGGQRQEASTGQSPEDHASLAPPLSPDHSSLEAKDGESGGSRVFSICRGEGEGQIWGLVEKETAIEGKVVSSLQQEIWEEEDLNRKEIQDSQVPLEKETLKSLGEEIQESLKTLENQSHETLERENQECPRSLEEDLETLKSLEKENKRAIKGCGGSETSRKRGCRQLKPTGKEDTQTLQSLQKENQELMKSLEGNLETFLFPGTENQELVSSLQENLESLTALEKENQEPLRSPEVGDEEALRPLTKENQEPLRSLEDENKEAFRSLEKENQEPLKTLEEEDQSIVRPLETENHKSLRSLEEQDQETLRTLEKETQQRRRSLGEQDQMTLRPPEKVDLEPLKSLDQEIARPLENENQEFLKSLKEESVEAVKSLETEILESLKSAGQENLETLKSPETQAPLWTPEEINKSGGNESSRKGNSRTTGVCGSEPRDIQTPGRGESGIIEISGSMEPGEFEISRGVDKESQRNLEEEENLGKGEYQESLRSLEEEGQELPQSADVQRWEDTVEKDQELAQESPPGMAGVENKDEAELNLREQDGFTGKEEVVEQGELNATEEVWFPGEGHPENPEPKEQRGLVEGASVKGGAEGLQDPEGQSQQVGTPGLQAPQGLPEAIEPLVEDDVAPGGDQASPEVMLGSEPAMGESAAGAEPGLGQGVGGLGDPGHLTREEVMEPPLEEESLEAKRVQGLEGPRKDLEEAGGLGTEFSELPGKSRDPWEPPREGREESEAEAPRGAEEAFPAETLGHTGSDAPSPWPLGSEEAEEDVPPVLVSPSPTYTPILEDAPGLQPQAEGSQEASWGVQGRAEAGKVESEQEELGSGEIPEGLQEEGEESREESEEDELGETLPDSTPLGFYLRSPTSPRWTPLESRGHPLKETGKEGWDPAVLASEGLEEPSEKEEGEEGEEECGRDSDLSEEFEDLGTEAPFLPGVPGEVAEPLGQVPQLLLDPAAWDRDGESDGFADEEESGEEGEEDQEEGREPGAGRWGPGSSVGSLQALSSSQRGEFLESDSVSVSVPWDDSLRGAVAGAPKTALETESQDSAEPSGSEEESDPVSLEREDKVPGPLEIPSGMEDAGPGADIIGVNGQGPNLEGKSQHVNGGVMNGLEQSEESGARNALVSEGDRGSPFQEEEGSALKRSSAGAPVHLGQGQFLKFTQREGDRESWSSGED

SEQ ID NO: 222 - protein, 747 aa, Homo sapiens
MADEAALALQPGGSPSAAGADREAASSPAGEPLRKRPRRDGPGLERSPGEPGGAAPEREVPAAARGCPGAAAAALWREAEAEAAAAGGEQEAQATAAAGEGDNGPGLQGPSREPPLADNLYDEDDDDEGEEEEEAAAAAIGYRDNLLFGDEIITNGFHSCESDEEDRASHASSSDWTPRPRIGPYTFVQQHLMIGTDPRTILKDLLPETIPPPELDDMTLWQIVINILSEPPKRKKRKDINTIEDAVKLLQECKKIIVLTGAGVSVSCGIPDFRSRDGIYARLAVDFPDLPDPQAMFDIEYFRKDPRPFFKFAKEIYPGQFQPSLCHKFIALSDKEGKLLRNYTQNIDTLEQVAGIQRIIQCHGSFATASCLICKYKVDCEAVRGDIFNQVVPRCPRCPADEPLAIMKPEIVFFGENLPEQFHRAMKYDKDEVDLLIVIGSSLKVRPVALIPSSIPHEVPQILINREPLPHLHFDVELLGDCDVIINELCHRLGGEYAKLCCNPVKLSEITEKPPRTQKELAYLSELPPTPLHVSEDSSSPERTSPPDSSVIVTLLDQAAKSNDDLDVSESKGCMEEKPQEVQTSRNVESIAEQMENPDLKNVGSSTGEKNERTSVAGTVRKCWPNRVAKEQISRRLDGNQYLFLPPNRYIFHGAEVYSDSEDDVLSSSSCGSNSDSGTCQSPSLEEPMEDESEIEEFYNGLEDEPDVPERAGGAGFGTDGDDQEAINEAISVKQEVTDMNYPSNKS

SEQ ID NO: 223 - protein, 694 aa, Homo sapiens
MEWGYLLEVTSLLAALALLQRSSGAAAASAKELACQEITVPLCKGIGYNYTYMPNQFNHDTQDEAGLEVHQFWPLVEIQCSPDLKFFLCSMYTPICLEDYKKPLPPCRSVCERAKAGCAPLMRQYGFAWPDRMRCDRLPEQGNPDTLCMDYNRTDLTTAAPSPPRRLPPPPPGEQPPSGSGHGRPPGARPPHRGGGRGGGGGDAAAPPARGGGGGGKARPPGGGAAPCEPGCQCRAPMVSVSSERHPLYNRVKTGQIANCALPCHNPFFSQDERAFTVFWIGLWSVLCFVSTFATVSTFLIDMERFKYPERPIIFLSACYLFVSVGYLVRLVAGHEKVACSGGAPGAGGAGGAGGAAAGAGAAGAGAGGPGGRGEYEELGAVEQHVRYETTGPALCTVVFLLVYFFGMASSIWWVILSLTWFLAAGMKWGNEAIAGYSQYFHLAAWLVPSVKSIAVLALSSVDGDPVAGICYVGNQSLDNLRGFVLAPLVIYLFIGTMFLLAGFVSLFRIRSVIKQQDGPTKTHKLEKLMIRLGLFTVLYTVPAAVVVACLFYEQHNRPRWEATHNCPCLRDLQPDQARRPDYAVFMLKYFMCLVVGITSGVWVWSGKTLESWRSLCTRCCWASKGAAVGGGAGATAAGGGGGPGGGGGGGPGGGGGPGGGGGSLYSDVSTGLTWRSGTASSVSYPKQMPLSQV

SEQ ID NO: 224 - protein, 529 aa, Homo sapiens [sequence omitted]

SEQ ID NO: 225 - protein, 581 aa, Homo sapiens
MQRPGPRLWLVLQVMGSCAAISSMDMERPGDGKCQPIEIPMCKDIGYNMTRMPNLMGHENQREAAIQLHEFAPLVEYGCHGHLRFFLCSLYAPMCTEQVSTPIPACRVMCEQARLKCSPIMEQFNFKWPDSLDCRKLPNKNDPNYLCMEAPNNGSDEPTRGSGLFPPLFRPQRPHSAQEHPLKDGGPGRGGCDNPGKFHHVEKSASCAPLCTPGVDVYWSREDKRFAVVWLAIWAVLCFFSSAFTVLTFLIDPARFRYPERPIIFLSMCYCVYSVGYLIRLFAGAESIACDRDSGQLYVIQEGLESTGCTLVFLVLYYFGMASSLWWVVLTLTWFLAAGKKWGHEAIEANSSYFHLAAWAIPAVKTILILVMRRVAGDELTGVCYVGSMDVNALTGFVLIPLACYLVIGTSFILSGFVALFHIRRVMKTGGENTDKLEKLMVRIGLFSVLYTVPATCVIACYFYERLNMDYWKILAAQHKCKMNNQTKTLDCLMAASIPAVEIFMVKIFMLLVVGITSGMWIWTSKTLQSWQQVCSRRLKKKSRRKPASVITSGGIYKKAQHPQKTHHGKYEIPAQSPTCV

SEQ ID NO: 226 - protein, 470 aa, Homo sapiens
MHFSIPETESRSGDSGGSAYVAYNIHVNGVLHCRVRYSQLLGLHEQLRKEYGANVLPAFPPKKLFSLTPAEVEQRREQLEKYMQAVRQDPLLGSSETFNSFLRRAQQETQQVPTEEVSLEVLLSNGQKVLVNVLTSDQTEDVLEAVAAKLDLPDDLIGYFSLFLVREKEDGAFSFVRKLQEFELPYVSVTSLRSQEYKIVLRKSYWDSAYDDDVMENRVGLNLLYAQTVSDIERGWILVTKEQHRQLKSLQEKVSKKEFLRLAQTLRHYGYLRFDACVADFPEKDCPVVVSAGNSELSLQLRLPGQQLREGSFRVTRMRCWRVTSSVPLPSGSTSSPGRGRGEVRLELAFEYLMSKDRLQWVTITSPQAIMMSICLQSMVDELMVKKSGGSIRKMLRRRVGGTLRRSDSQQAVKSPPLLESPDATRESMVKLSSKLSAVSLRGIGSPSTDASASDVHGNFAFEGIGDEDL

SEQ ID NO: 227 - protein, 114 aa, Homo sapiens
PMFIVNTNVPRASVPDGFLSELTQQLAQATGKPPQYIAVHVVPDQLMAFGGSSEPCALCSLHSIGKIGGAQNRSYSKLLCGLLAERLRISPDRVYINYYDMNAANVGWNNSTFA

SEQ ID NO: 228 - protein, 181 aa, Homo sapiens
MFKKFDEKENVSNCIQLKTSVIKGIKNQLIEQFPGIEPWLNQIMPKKDPVKIVRCHEHIEILTVNGELLFFRQREGPFYPTLRLLHKYPFILPHQQVDKGAIKFVLSGANIMCPGLTSPGAKLYPAAVDTIVAIMAEGKQHALCVGVMKMSAEDIEKVNKGIGIENIHYLNDGLWHMKTYK

SEQ ID NO: 229 - protein, 970 aa, Homo sapiens
MANETQKVGAIHFPFPFTPYSIQEDFMAELYRVLEAGKIGIFESPTGTGKSLSLICGALSWLRDFEQKKREEEARLLETGTGPLHDEKDESLCLSSSCEGAAGTPRPAGEPAWVTQFVQKKEERDLVDRLKAEQARRKQREERLQQLQHRVQLKYAAKRLRQEEEERENLLRLSREMLETGPEAERLEQLESGEEELVLAEYESDEEKKVASRVDEDEDDLEEEHITKIYYCSRTHSQLAQFVHEVKKSPFGKDVRLVSLGSRQNLCVNEDVKSLGSVQLINDRCVDMQRSRHEKKKGAEEEKPKRRRQEKQAACPFYNHEQMGLLRDEALAEVKDMEQLLALGKEARACPYYGSRLAIPAAQLVVLPYQMLLHAATRQAAGIRLQDQVVIIDEAHNLIDTITGMHSVEVSGSQLCQAHSQLLQYVERYGKRLKAKNLMYLKQILYLLEKFVAVLGGNIKQNPNTQSLSQTGTELKTINDFLFQSQIDNINLFKVQRYCEKSMISRKLFGFTERYGAVFSSREQPKLAGFQQFLQSLQPRTTEALAAPADESQASTLRPASPLMHIQGFLAALTTANQDGRVILSRQGSLSQSTLKFLLLNPAVHFAQVVKECRAVVIAGGTMQPVSDFRQQLLACAGVEAERVVEFSCGHVIPPDNILPLVICSGISNQPLEFTFQKRELPQMMDEVGRILCNLCGVVPGGVVCFFPSYEYLRQVHAHWEKGGLLGRLAARKKIFQEPKSAHQVEQVLLAYSRCIQACGQERGQVTGALLLSVVGGKMSEGINFSDNLGRCVVMVGMPFPNIRSAELQEKMAYLDQTLSPRPGTPREGSGGEPVHEGRQPVHRQGHQAPEGFCQRSAPGPAICPAPCPGQAAGLDPSPCGGQSYLWPRHCCCAEVSPGEVGLFLMGNHTTAWRRALPLSCPLETVFVVGVVCGDPVTKVKPRRRVWSPECCQDPGTGVSSRRRKWGNPE

SEQ ID NO: 230 - protein, 1038 aa, Homo sapiens
MTSSLQRPWRVPWLPWTILLVSTAAASQNQERLCAFKDPYQQDLGIGESRISHENGTILCSKGSTCYGLWEKSKGDINLVKQGCWSHIGDPQECHYEECVVTTTPPSIQNGTYRFCCCSTDLCNVNFTENFPPPDTTPLSPPHSFNRDETIIIALASVSVLAVLIVALCFGYRMLTGDRKQGLHSMNMMEAAASEPSLDLDNLKLLELIGRGRYGAVYKGSLDERPVAVKVFSFANRQNFINEKNIYRVPLMEHDNIARFIVGDERVTADGRMEYLLVMEYYPNGSLCKYLSLHTSDWVSSCRLAHSVTRGLAYLHTELPRGDHYKPAISHRDLNSRNVLVKNDGTCVISDFGLSMRLTGNRLVRPGEEDNAAISEVGTIRYMAPEVLEGAVNLRDCESALKQVDMYALGLIYWEIFMRCTDLFPGESVPEYQMAFQTEVGNHPTFEDMQVLVSREKQRPKFPEAWKENSLAVRSLKETIEDCWDQDAEARLTAQCAEERMAELMMIWERNKSVSPTVNPMSTAMQNERNLSHNRRVPKIGPYPDYSSSSYIEDSIHHTDSIVKNISSEHSMSSTPLTIGEKNRNSINYERQQAQARIPSPETSVTSLSTNTTTTNTTGLTPSTGMTTISEMPYPDETNLHTTNVAQSIGPTPVCLQLTEEDLETNKLDPKEVDKNLKESSDENLMEHSLKQFSGPDPLSSTSSSLLYPLIKLAVEATGQQDFTQTANGQACLIPDVLPTQIYPLPKQQNLPKRPTSLPLNTKNSTKEPRLKFGSKHKSNLKQVETGVAKMNTINAAEPHVVTVTMNGVAGRNHSVNSHAATTQYANGTVLSGQTTNIVTHRAQEMLQNQFIGEDTRLNINSSPDEHEPLLRREQQAGHDEGVLDRLVDRRERPLEGGRTNSNNNNSNPCSEQDVLAQGVPSTAADPGPSKPRRAQRPNSLDLSATNVLDGSSIQIGESTQDGKSGSGEKIKKRVKTPYSLKRWRPSTWVISTESLDCEVNNNGSNRAVHSKSSTAVYLAEGGTATTMVSKDIGMNCL

SEQ ID NO: 231 - protein, 932 aa, Homo sapiens
MIPARLHRDYKGLVLLGILLGTLWETGCTQIRYSVPEELEKGSRVGDISRDLGLEPRELAERGVRIIPRGRTQLFALNPRSGSLVTAGRIDREELCMGAIKCQLNLDILMEDKVKIYGVEVEVRDINDNAPYFRESELEIKISENAATEMRFPLPHAWDPDIGKNSLQSYELSPNTHFSLIVQNGADGSKYPELVLKRALDREEKAAHHLVLTASDGGDPVRTGTARIRVMVLDANDNAPAFAQPEYRASVPENLALGTQLLVVNATDPDEGVNAEVRYSFRYVDDKAAQVFKLDCNSGTISTIGELDHEESGFYQMEVQAMDNAGYSARAKVLITVLDVNDNAPEVVLTSLASSVPENSPRGTLIALLNVNDQDSEENGQVICFIQGNLPFKLEKSYGNYYSLVTDIVLDREQVPSYNITVTATDRGTPPLSTETHISLNVADTNDNPPVFPQASYSAYIPENNPRGVSLVSVTAHDPDCEENAQITYSLAENTIQGASLSSYVSINSDTGVLYALSSFDYEQFRDLQVKVMARDNGHPPLSSNVSLSLFVLDQNDNAPEILYPALPTDGSTGVELAPRSAEPGYLVTKVVAVDRDSGQNAWLSYRLLKASEPGLFSVGLHTGEVRTARALLDRDALKQSLVVAVQDHGQPPLSATVTLTVAVADSIPQVLADLGSLESPANSETSDLTLYLVVAVAAVSCVFLAFVILLLALRLRRWHKSRLLQASGGGLTGAPASHFVGVDGVQAFLQTYSHEVSLTTDSRKSHLIFPQPNYADMLVSQESFEKSEPLLLSGDSVFSKDSHGLIEQAPPNTDWRFSQAQRPGTSGSQNGDDTGTWPNNQFDTEMLQAMILASASEAADGSSTLGGGAGTMGLSARYGPQFTLQHVPDYRQNVYIPGSNATLTNAAGKRDGKAPAGGNGNKKKSGKKEKK

SEQ ID NO: 232 - protein, 1233 aa, Homo sapiens
MSIDHLKQKIPPALFYKETYLGPNEVLKNGMYCSLYEVVEKTRIGSNMESLLQKLDREKLVLVKPLGDRGYLFLLSPYQMVPPYEYQTAKSRVLHALFLFQEPRSIVTSQKGSTNAAPQERHESMPDVLKIAQFLQFSLIQCRKEFKNISAINFHSVVEKYVSEFFKRGFGSGKREFIMFPYDSRLDDKKFLYSAPRNKSHIDTCLHAYIFRPEVYQLPICKLKELFEENRKLQQFSPLSDYEGQEEEMNGTKMKFGKRNNSRGEAIISGKQRSSHSLDYDKDRVKELINLIQCRKKSVGGDSDTEDMRSKTVLKRKLEDLPENMRKLAKTSNLSENCHLYEESPQPIGSLGHDADLRRQQQDTCNSGIADIHRLFNWLSETLANARHSDASLTDTVNKALGLSTDDAYEELRQKHEYELNSTPDKKDYEQPTCAKVENAQFKGTQSLLLEVDATSKYSVAISTSEVGTDHKLHLKEDPNLISVNNFEDCSLCPSVPIEHGFRRQQSKSNNVEETEIHWKLIPITGGNARSPEDQLGKHGEKQTPDTLKGTTEDDVLTGQVEEQCVPAAEAEPPAVSETTERTVLGEYNLFSRKIEEILKQKNVSYVSRVSTPIFSTQEKMKRLSEFIYSKTSKAGVQEFVDGLHEKLNTIIIKASAKGGNLPPVSPNDSGAKIASNPLERHVIPVSSSDFSNKHLLGPLCSDPLKDTNSDEQHSTSALTEVEMNQPQHATELMVTSDHIVPGDMAREPVEETTKSPSDVNISAQPALSNFISQLEPEVFNSLVKIMKDVQKNTVKFYIHEEEESVLCKEIKEYLIKLGNTECHPEQFLERRSKLDKLLIIIQNEDIAGFIHKIPGLVTLKKLPCVSFAGVDSLDDVKNHTYNELFVSGGFIVSDESILNPEVVTVENLKNFLTFLEELSTPEGKWQWKVHCKFQKKLKELGRLNAKALSLLTLLNVYQKKHLVEILSYHNCDSQTRNAPELDCLIRLQAQNIQQRHIVFLTEKNIKMLSSYTDNGIVVATAEDFMQNFKNLVGYHNSITEENLPQLGANENLESQSALLENDEKDEEDMSLDSGDEISHIEVCSNFHSEIWEKETKGSRGTDQKKNTQIELQSSPDVQNSLLEDKTYLDSEERTSIDIVCSEGENSNSTEQDSYSNFQVYHSQLNMSHQFSHFNVLTHQTFLGTPYALSSSQSQENENYFLSAYTESLDRDKSPPPLSWGKSDSSRPYSQEK

SEQ ID NO: 233 - protein, 627 aa, Homo sapiens [sequence omitted]

SEQ ID NO: 234 - protein, 1426 aa, Homo sapiens
MHSSNPKVRSSPSGNTQSSPKSKQEVMVRPPTVMSPSGNPQLDSKFSNQGKQGGSASQSQPSPCDSKSGGHTPKALPGPGGSMGLKNGAGNGAKGKGKRERSISADSFDQRDPGTPNDDSDIKECNSADHIKSQDSQHTPHSMTPSNATAPRSSTPSHGQTTATEPTPAQKTPAKVVYVFSTEMANKAAEAVLKGQVETIVSFHIQNISNNKTERSTAPLNTQISALRNDPKPLPQQPPVPANQDQNSSQNTRLQPTPPIPAPAPKPAAPPRPLDRESPGVENKLIPSVGSPASSTPLPPDGTGPNSTPNNRAVTPVSQGSNSSSADPKAPPPPPVSSGEPPTLGENPDGLSQEQLEHRERSLQTLRDIQRMLFPDEKEFTGAQSGGPQQNPGVLDGPQKKPEGPIQAMMAQSQSLGKGPGPRTDVGAPFGPQGHRDVPFSPDEMVPPSMNSQSGTIGPDHLDHMTPEQIAWLKLQQEFYEEKRRKPEQVVVQQCSLQDMMVHQHGPRGVVRGPPPPYQMTPSEGWAPGGTEPFSDGINMPHSLPPRGMAPHPNMPGSQMRLPGFAGMINSEMEGPNVPNPASRPGLSGVSWPDDVPKIPDGRNFPPGRGIFSGPGRGERFPNPQGLSEEMFQQQLAEKQLGLPPGMAMEGIRPSMEMNRMIPGSQRHMEPGNNPIFPRIPVEGPLSPSRGDFPKGIPPQMGPGRELEFGMVPSGMKGDVNLNVNMGSNSQMIPQKMREAGAGPEEMLKLRPGGSDMLPAQQKMVPLPFGEHPQQEYGMGPRPFLPMSQGPGSNSGLRNLREPIGPDQRTNSRLSHMPPLPLNPSSNPTSLNTAPPVQRGLGRKPLDISVAGSQVHSPGINPLKSPTMHQVQSPMLGSPSGNLKSPQTPSQLAGMLAGPAAAASIKSPPVLGSAAASPVHLKSPSLPAPSPGWTSSPKPPLQSPGIPPNHKAPLTMASPAMLGNVESGGPPPPTASQPASVNIPGSLPSSTPYTMPPEPTLSQNPLSIMMSRMSKFAMPSSTPLYHDAIKTVASSDDDSPPARSPNLPSMNNMPGMGINTQNPRISGPNPVVPMPTLSPMGMTQPLSHSNQMPSPNAVGPNIPPHGVPMGPGLMSHNPIMGHGSQEPPMVPQGRMGFPQGFPPVQSPPQQVPFPHNGPSGGQGSFPGGMGFPGEGPLGRPSNLPQSSADAALCKPGGPGGPDSFTVLGNSMPSVFTDPDLQEVIRPGATGIPEFDLSRIIPSEKPSQTLQYFPRGEVPGRKQPQGPGPGFSHMQGMMGEQAPRMGLALPGMGGPGPVGTPDIPLGTAPSMPGHNPMRPPAFLQQGMMGPHHRMMSPAQSTMPGQPTLMSNPAAAVGMIPGKDRGPAGLYTHPGPVGSPGMMMSMQGMMGPQQNIMIPPQMRPRGMAADVGMGGFSQGPGNPGNMMF

SEQ ID NO: 235 - protein, 2556 aa, Homo sapiens
MPPLLAPLLCLALLPALAARGPRCSQPGETCLNGGKCEAANGTEACVCGGAFVGPRCQDPNPCLSTPCKNAGTCHVVDRRGVADYACSCALGFSGPLCLTPLDNACLTNPCRNGGTCDLLTLTEYKCRCPPGWSGKSCQQADPCASNPCANGGQCLPFEASYICHCPPSFHGPTCRQDVNECGQKPRLCRHGGTCHNEVGSYRCVCRATHTGPNCERPYVPCSPSPCQNGGTCRPTGDVTHECACLPGFTGQNCEENIDDCPGNNCKNGGACVDGVNTYNCPCPPEWTGQYCTEDVDECQLMPNACQNGGTCHNTHGGYNCVCVNGWTGEDCSENIDDCASAACFHGATCHDRVASFYCECPHGRTGLLCHLNDACISNPCNEGSNCDTNPVNGKAICTCPSGYTGPACSQDVDECSLGANPCEHAGKCINTLGSFECQCLQGYTGPRCEIDVNECVSNPCQNDATCLDQIGEFQCMCMPGYEGVHCEVNTDECASSPCLHNGRCLDKINEFQCECPTGFTGHLCQYDVDECASTPCKNGAKCLDGPNTYTCVCTEGYTGTHCEVDIDECDPDPCHYGSCKDGVATFTCLCRPGYTGHHCETNINECSSQPCRLRGTCQDPDNAYLCFCLKGTTGPNCEINLDDCASSPCDSGTCLDKIDGYECACEPGYTGSMCNSNIDECAGNPCHNGGTCEDGINGFTCRCPEGYHDPTCLSEVNECNSNPCVHGACRDSLNGYKCDCDPGWSGTNCDINNNECESNPCVNGGTCKDMTSGIVCTCREGFSGPNCQTNINECASNPCLNKGTCIDDVAGYKCNCLLPYTGATCEVVLAPCAPSPCRNGGECRQSEDYESFSCVCPTAGAKGQTCEVDINECVLSPCRHGASCQNTHGGYRCHCQAGYSGRNCETDIDDCRPNPCHNGGSCTDGINTAFCDCLPGFRGTFCEEDINECASDPCRNGANCTDCVDSYTCTCPAGFSGIHCENNTPDCTESSCFNGGTCVDGINSFTCLCPPGFTGSYCQHVVNECDSRPCLLGGTCQDGRGLHRCTCPQGYTGPNCQNLVHWCDSSPCKNGGKCWQTHTQYRCECPSGWTGLYCDVPSVSCEVAAQRQGVDVARLCQHGGLCVDAGNTHHCRCQAGYTGSYCEDLVDECSPSPCQNGATCTDYLGGYSCKCVAGYHGVNCSEEIDECLSHPCQNGGTCLDLPNTYKCSCPRGTQGVHCEINVDDCNPPVDPVSRSPKCFNNGTCVDQVGGYSCTCPPGFVGERCEGDVNECLSNPCDARGTQNCVQRVNDFHCECRAGHTGRRCESVINGCKGKPCKNGGTCAVASNTARGFICKCPAGFEGATCENDARTCGSLRCLNGGTCISGPRSPTCLCLGPFTGPECQFPASSPCLGGNPCYNQGTCEPTSESPFYRCLCPAKFNGLLCHILDYSFGGGAGRDIPPPLIEEACELPECQEDAGNKVCSLQCNNHACGWDGGDCSLNFNDPWKNCTQSLQCWKYFSDGHCDSQCNSAGCLFDGFDCQRAEGQCNPLYDQYCKDHFSDGHCDQGCNSAECEWDGLDCAEHVPERLAAGTLVVVVLMPPEQLRNSSFHFLRELSRVLHTNVVFKRDAHGQQMIFPYYGREEELRKHPIKRAAEGWAAPDALLGQVKASLLPGGSEGGRRRRELDPMDVRGSIVYLEIDNRQCVQASSQCFQSATDVAAFLGALASLGSLNIPYKIEAVQSETVEPPPPAQLHFMYVAAAAFVLLFFVGCGVLLSRKRRRQHGQLWFPEGFKVSEASKKKRREPLGEDSVGLKPLKNASDGALMDDNQNEWGDEDLETKKFRFEEPVVLPDLDDQTDHRQWTQQHLDAADLRMSAMAPTPPQGEVDADCMDVNVRGPDGFTPLMIASCSGGGLETGNSEEEEDAPAVISDFIYQGASLHNQTDRTGETALHLAARYSRSDAAKRLLEASADANIQDNMGRTPLHAAVSADAQGVFQILIRNRATDLDARMHDGTTPLILAARLAVEGMLEDLINSHADVNAVDDLGKSALHWAAAVNNVDAAVVLLKNGANKDMQNNREETPLFLAAREGSYETAKVLLDHFANRDITDHMDRLPRDIAQERMHHDIVRLLDEYNLVRSPQLHGAPLGGTPTLSPPLCSPNGYLGSLKPGVQGKKVRKPSSKGLACGSKEAKDLKARRKKSQDGKGCLLDSSGMLSPVDSLESPHGYLSDVASPPLLPSPFQQSPSVPLNHLPGMPDTHLGIGHLNVAAKPEMAALGGGGRLAFETGPPRLSHLPVASGTSTVLGSSSGGALNFTVGGSTSLNGQCEWLSRLQSGMVPNQYNPLRGSVAPGPLSTQAPSLQHGMVGPLHSSLAASALSQMMSYQGLPSTRLATQPHLVQTQQVQPQNLQMQQQNLQPANIQQQQSLQPPPPPPQPHLGVSSAASGHLGRSFLSGEPSQADVQPLGPSSLAVHTILPQESPALPTSLPSSLVPPVTAAQFLTPPSQHSYSSPVDNTPSHQLQVPEHPFLTPSPESPDQWSSSSPHSNVSDWSEGVSSPPTSMQSQIARIPEAFK

SEQ ID NO: 236 - protein, 237 aa, Homo sapiens
MNIFDRKINFDALLKFSHITPSTQQHLKKVYASFALCMFVAAAGAYVHMVTHFIQAGLLSALGSLILMIWLMATPHSHETEQKRLGLLAGFAFLTGVGLGPALEFCIAVNPSILPTAFMGTAMIFTCFTLSALYARRRSYLFLGGILMSALSLLLLSSLGNVFFGSIWLFQANLYVGLVVMCGFVLFDTQLIIEKAEHGDQDYIWHCIDLFLDFITVFRKLMMILAMNEKDKKKEKK

SEQ ID NO: 237 - protein, 460 aa, Homo sapiens
MNFSEVFKLSSLLCKFSPDGKYLASCVQYRLVVRDVNTLQILQLYTCLDQIQHIEWSADSLFILCAMYKRGLVQVWSLEQPEWHCKIDEGSAGLVASCWSPDGRHILNTTEFHLRITVWSLCTKSVSYIKYPKACLQGITFTRDGRYMALAERRDCKDYVSIFVCSDWQLLRHFDTDTQDLTGIEWAPNGCVLAVWDTCLEYKILLYSLDGRLLSTYSAYEWSLGIKSVAWSPSSQFLAVGSYDGKVRILNHVTWKMITEFGHPAAINDPKIVVYKEAEKSPQLGLGCLSFPPPRAGAGPLPSSESKYEIASVPVSLQTLKPVTDRANPKIGIGMLAFSPDSYFLATRNDNIPNAVWVWDIQKLRLFAVLEQLSPVRAFQWDPQQPRLAICTGGSRLYLWSPAGCMSVQVPGEGDFAVLSLCWHLSGDSMALLSKDHFCLCFLETEAVVGTACRQLGGHT

SEQ ID NO: 238 - protein, 1142 aa, Homo sapiens
MAFCAKMRSSKKTEVNLEAPEPGVEVIFYLSDREPLRLGSGEYTAEELCIRAAQACRISPLCHNLFALYDENTKLWYAPNRTITVDDKMSLRLHYRMRFYFTNWHGTNDNEQSVWRHSPKKQKNGYEKKKIPDATPLLDASSLEYLFAQGQYDLVKCLAPIRDPKTEQDGHDIENECLGMAVLAISHYAMMKKMQLPELPKDISYKRYIPETLNKSIRQRNLLTRMRINNVFKDFLKEFNNKTICDSSVSTHDLKVKYLATLETLTKHYGAEIFETSMLLISSENEMNWFHSNDGGNVLYYEVMVTGNLGIQWRHKPNVVSVEKEKNKLKRKKLENKDKKDEEKNKIREEWNNFSFFPEITHIVIKESVVSINKQDNKKMELKLSSHEEALSFVSLVDGYFRLTADAHHYLCTDVAPPLIVHNIQNGCHGPICTEYAINKLRQEGSEEGMYVLRWSCTDFDNILMTVTCFEKSEQVQGAQKQFKNFQIEVQKGRYSLHGSDRSFPSLGDLMSHLKKQILRTDNISFMLKRCCQPKPREISNLLVATKKAQEWQPVYPMSQLSFDRILKKDLVQGEHLGRGTRTHIYSGTLMDYKDDEGTSEEKKIKVILKVLDPSHRDISLAFFEAASMMRQVSHKHIVYLYGVCVRDVENIMVEEFVEGGPLDLFMHRKSDVLTTPWKFKVAKQLASALSYLEDKDLVHGNVCTKNLLLAREGIDSECGPFIKLSDPGIPITVLSRQECIERIPWIAPECVEDSKNLSVAADKWSFGTTLWEICYNGEIPLKDKTLIEKERFYESRCRPVTPSCKELADLMTRCMNYDPNQRPFFRAIMRDINKLEEQNPDIVSRKKNQPTEVDPTHFEKRFLKRIRDLGEGHFGKVELCRYDPEDNTGEQVAVKSLKPESGGNHIADLKKEIEILRNLYHENIVKYKGICTEDGGNGIKLIMEFLPSGSLKEYLPKNKNKINLKQQLKYAVQICKGMDYLGSRQYVHRDLAARNVLVESEHQVKIGDFGLTKAIETDKEYYTVKDDRDSPVFWYAPECLMQSKFYIASDVWSFGVTLHELLTYCDSDSSPMALFLKMIGPTHGQMTVTRLVNTLKEGKRLPCPPNCPDEVYQLMRKCWEFQPSNRTSFQNLIEGFEALLK

SEQ ID NO: 239 - protein, 189 aa, Homo sapiens
MASKRALVILAKGAEEMETVIPVDVMRRAGIKVTVAGLAGKDPVQCSRDVVICPDASLEDAKKEGPYDVVVLPGGNLGAQNLSESAAVKEILKEQENRKGLIAAICAGPTALLAHEIGFGSKVTTHPLAKDKMMNGGHYTYSENRVEKDGLILTSRGPGTSFEFALAIVEALNGKEVAAQVKAPLVLKD

SEQ ID NO: 240 - protein, 482 aa, Homo sapiens
SIRVTQKSYKVSTSGPRAFSSRSYTSGPGSRISSSSFSRVGSSNFRGGLGGGYGGASGMGGITAVTVNQSLLSPLVLEVDPNIQAVRTQEKEQIKTLNNKFASFIDKVRFLEQQNKMLETKWSLLQQQKTARSNMDNMFESYINNLRRQLETLGQEKLKLEAELGNMQGLVEDFKNKYEDEINKRTEMENEFVLIKKDVDEAYMNKVELESRLEGLTDEINFLRQLYEEEIRELQSQISDTSVVLSMDNSRSLDMDSIIAEVKAQYEDIANRSRAEAESMYQIKYEELQSLAGKHGDDLRRTKTEISEMNRNISRLQAEIEGLKGQRASLEAAIADAEQRGELAIKDANAKLSELEAALQRAKQDMARQLREYQELMNVKLALDIEIATYRKLLEGEESRLESGMQNMSIHTKTTSGYAGGLSSAYGGLTSPGLSYSLGSSFGSGAGSSSFSRTSSSRAVVVKKIETRDGKLVSESSDVLPK

SEQ ID NO: 241 - protein, 387 aa, Homo sapiens
MPRPRLLAALCGALLCAPSLLVALDICSKNPCHNGGLCEEISQEVRGDVFPSYTCTCLKGYAGNHCETKCVEPLGMENGNIANSQIAASSVRVTFLGLQHWVPELARLNRAGMVNAWTPSSNDDNPWIQVNLLRRMWVTGVVTQGASRLASHEYLKAFKVAYSLNGHEFDFIHDVNKKHKEFVGNWNKNAVHVNLFETPVEAQYVRLYPTSCHTACTLRFELLGCELNGCANPLGLKNNSIPDKQITASSSYKTWGLHLFSWNPSYARLDKQGNFNAWVAGSYGNDQWLQVDLGSSKEVTGIITQGARNFGSVQFVASYKVAYSNDSANWTEYQDPRTGSSKIFPGNWDNHSHKKNLFETPILARYVRILPVAWHNRIALRLELLGC

SEQ ID NO: 242 - protein, 654 aa, Homo sapiens
MNQPQRMAPVGTDKELSDLLDFSMMFPLPVTNGKGRPASLAGAQFGGSGLEDRPSSGSWGSGDQSSSSFDPSRTFSEGTHFTESHSSLSSSTFLGPGLGGKSGERGAYASFGRDAGVGGLTQAGFLSGELALNSPGPLSPSGMKGTSQYYPSYSGSSRRRAADGSLDTQPKKVRKVPPGLPSSVYPPSSGEDYGRDATAYPSAKTPSSTYPAPFYVADGSLHPSAELWSPPGQAGFGPMLGGGSSPLPLPPGSGPVGSSGSSSTFGGLHQHERMGYQLHGAEVNGGLPSASSFSSAPGATYGGVSSHTPPVSGADSLLGSRGTTAGSSGDALGKALASIYSPDHSSNNFSSSPSTPVGSPQGLAGTSQWPRAGAPGALSPSYDGGLHGLQSKIEDHLDEAIHVLRSHAVGTAGDMHTLLPGHGALASGFTGPMSLGGRHAGLVGGSHPEDGLAGSTSLMHNHAALPSQPGTLPDLSRPPDSYSGLGRAGATAAASEIKREEKEDEENTSAADHSEEEKKELKAPRARTSPDEDEDDLLPPEQKAEREKERRVANNARERLRVRDINEAFKELGRMCQLHLNSEKPQTKLLILHQAVSVILNLEQQVRERNLNPKAACLKRREEEKVSGVVGDPQMVLSAPHPGLSEAHNPAGHM

We claim:

1. An isolated oligopeptide or peptide comprising at least one peptide having an amino acid sequence selected from the group consisting of SEQ ID NO: 1-125, said oligopeptide or peptide consisting of 8 to about 50 amino acid residues, wherein said oligopeptide or peptide binds to class I MHC molecules or can be processed to bind to class I MHC molecules.

2. The oligopeptide of claim 1 wherein said oligopeptide comprises at least two epitopic peptides.

3. The oligopeptide of claim 1 wherein said oligopeptide comprises at least three epitopic peptides.

4. The oligopeptide of claim 1 wherein said oligopeptide comprises at least four epitopic peptides.

5. The oligopeptide or peptide of claim 1 wherein said oligopeptide or peptide differs from SEQ ID NO: 1, 2, 3, 4, 5, 6, 7, 8, 9, 10, 11, 12, 13, 14, 15, 16, 17, 18, 19, 20, 21, 22, 23, 24, 25, 26, 27, 28, 29, 30, 31, 32, 33, 34, 35, 36, 37, 38, 39, 40, 41, 42, 43, 44, 45, 46, 47, 48, 49, 50, 51, 52, 53, 54, 55, 56, 57, 58, 59, 60, 61, 62, 63, 64, 65, 66, 67, 68, 69, 70, 71, 72, 73, 74, 75, 76, 77, 78, 79, 80, 81, 82, 83, 84, 85, 86, 87, 88, 89, 90, 91, 92, 93, 94, 95, 96, 97, 98, 99, 100, 101, 102, 103, 104, 105, 106, 107, 108, 109, 110, 111, 112, 113, 114, 115, 116, 117, 118, 119, 120, 121, 122, 123, 124, or 125 wherein said difference is no more than one amino acid unit.

6. The oligopeptide or peptide of claim 5 wherein said one amino acid difference is the result of a conservative amino acid substitution.

7. The oligopeptide or peptide of claim 5 wherein said one amino acid difference is the substitution of one hydrophobic amino acid with another hydrophobic amino acid.

8. The oligopeptide or peptide of claim 5 wherein said amino acid difference is the addition or deletion of one amino acid to or from said epitopic peptide.

9. A polynucleotide comprising a polynucleotide selected from the group consisting of:
(a) a polynucleotide that encodes an oligopeptide or peptide of claim 1, and
(b) the full complement of (a).

10. The polynucleotide of claim 9 wherein the polynucleotide of (a) is DNA.

11. The polynucleotide of claim 9 wherein the polynucleotide of (a) is RNA.

12. A method for treating a subject with cancer, said cancer characterized by the presence of cancer stem cells, said cancer stem cells expressing any class I MHC molecule, comprising administering to said subject a composition that binds to class I MHC molecules or can be processed to bind to class I MHC molecules comprising:
at least one polypeptide comprising an epitopic peptide comprising an amino acid sequence selected from the group consisting of SEQ ID NO: 1 to 242 in an amount sufficient to induce a CTL response to said tumor cells; or
at least one polypeptide comprising an epitopic peptide having at least one amino acid difference from an amino acid sequence selected from the group consisting of SEQ ID NO: 1 to 242 in an amount sufficient to induce a CTL response to said tumor cells.

13. A method for treating a subject with cancer, said cancer characterized by the presence of cancer stem cells, said cancer stem cells expressing any class I MHC molecule, said method comprising administering to said subject a composition that binds to class I MHC molecules or can be processed to bind to class I MHC molecules comprising:
a polynucleotide comprising a nucleic acid sequence encoding at least one polypeptide comprising an amino acid sequence selected from the group consisting of SEQ ID NO: 1 to 242 in an amount sufficient to induce a CTL response to said tumor cells; or
at least one polypeptide comprising an epitopic peptide comprising one amino acid difference from an amino acid sequence selected from the group consisting of SEQ ID NO: 1 to 242 in an amount sufficient to induce a CTL response to said tumor cells.

14. A method for treating a subject with cancer, said cancer characterized by the presence of cancer stem cells, said method comprising:
stimulating the production of antibodies for use in passive immunotherapy, wherein said antibodies react with at least one polypeptide comprising an amino acid sequence selected from the group consisting of SEQ ID NO: 126 to 242; or
at least one polypeptide comprising one amino acid difference from an amino acid sequence selected from the group consisting of SEQ ID NO: 126 to 242.

15. The method of claim 14, wherein said antibodies are recombinant antibodies.

16. A method for diagnosing the presence of cancer stem cells in a subject comprising obtaining a tissue sample from said subject; and detecting at least one polypeptide comprising an amino acid sequence selected from the group consisting of SEQ ID NO: 126 to 242 in said sample.
